(19) United States
(12) Patent Application Publication
(10) Pub. No.: US 2013/0149323 A1
(43) Pub. Date: Jun. 13, 2013

(54) MUTATED LENTIVIRAL ENV PROTEINS AND THEIR USE AS DRUGS

(71) Applicants: Centre National De La Recherche Scientifique, Paris Cedex (FR); Universite Paris-Sud XI, Orsay Cedex (FR); Institut Gustave Roussy, Villejuif Cedex (FR); Viroxis S.A.S., Paris (FR)

(72) Inventor: Thierry HEIDMANN, Paris (FR)

(73) Assignees: CENTRE NATIONAL DE LA RECHERCHE SCIENTIFIQUE, PARIS CEDEX (FR); VIROXIS S.A.S., PARIS (FR); INSTITUT GUSTAVE ROUSSY, VILLEJUIF CEDEX (FR); UNIVERSITE PARIS-SUD XI, ORSAY CEDEX (FR)

(21) Appl. No.: 13/707,885

(22) Filed: Dec. 7, 2012

Related U.S. Application Data
(60) Provisional application No. 61/567,810, filed on Dec. 7, 2011.

(51) Int. Cl. A61K 39/12

(52) U.S. Cl. 424/186.1; 530/350; 536/23.72; 435/320.1

(57) ABSTRACT

A pharmaceutical composition includes, as active substance a mutated lentiviral ENV protein, substantially devoid of immunosuppressive properties or a variant of the mutated lentiviral ENV protein or a fragment of the above proteins, in association with a pharmaceutically acceptable carrier.

[0001] The present invention relates to mutated lentiviral ENV proteins and their use as drugs.

[0002] Lentivirus is a genus of slow viruses of the Retroviridae family, characterized by a long incubation period. Lentiviruses can deliver a significant amount of genetic information into the DNA of the host cell and have the unique ability among retroviruses of being able to replicate in non-dividing cells, so they are one of the most efficient methods of a gene delivery vector. HIV, SIV, and FIV are all examples of lentiviruses.

[0003] Human immunodeficiency virus (HIV) is according to WHO one of the most serious health crisis the world faces today. AIDS has killed more than 25 million people since 1981. In the most severely affected countries, the average life expectancy is now declining to 49 years of age—13 years less than in the absence of AIDS. According to UNAIDS an estimated number of 39.5 million people were living with HIV virus in 2006 and 4.3 million were infected in 2006. In many regions new infections are heavily concentrated in the younger generations (15-24 years of age). Access to treatment and care has greatly increased in recent years. Determining real time trends to HIV incidence and in particular the impact of prevention programmes ideally requires long studies of a large number of people. Given the practical difficulties of conducting such studies focus has been placed on young women and their infants. Children living with HIV typically acquire infection through a mother-to-child-transmission (MTCT), which occur during pregnancy, delivery or during breastfeeding. Renewed efforts are urgently required to increase access to comprehensive and integrated programs to prevent HIV infection in infants and young children, which will indicate a route to HIV-free generations.

[0004] There are two known types of HIV; HIV-1 and HIV-2 that infect humans. They belong to a group of retroviruses called Lentiviruses and a virus similar to HIV has been found in African monkeys. Retroviruses transfer their genes from a producer cell to a target cell as a genomic RNA transcript, which is reverse-transcribed after infection and integrated into the DNA genome of the target cell.

[0005] The first person with a documented HIV-infection died in 1959. In the early 1980s doctors in the US become aware, that more and more patients suffered from abnormal infections and showed signs of immune failure. The syndrome was named Acquired Immune Deficiency Syndrome (AIDS) and it was soon after discovered that HIV was the causative agent for the observed destruction of the immune system. Initially patients were offered a treatment based solely on pain relief and almost all inevitably died. In mid 1990s there were two important breakthroughs in treatment. Firstly, a new group of antiretroviral agents were discovered and secondly it became possible to measure the amount of HIV virus in blood. These two advances made it possible to treat patients with a combination of different agents and doctors were able to check, whether the treatment actually worked. The result was that the immune system of infected patients gradually became normal and patients lived longer. Today infected people in Western countries are having the same level of quality of life as those not infected and they are able to have children, although the economical and psychological consequences of having HIV are huge. The situation is, however, even more severe in developing countries, where more than 95% of those people infected with HIV/AIDS are living. Worldwide more than 25 million people have died from AIDS in the last 25 years.

[0006] Approximately 95% of the people who get infected today live in the developing countries, where expensive antiviral drugs are not available. Therefore, there is an urgent need for an effective vaccine—the only effective solution to the uncontrolled HIV pandemic. During the last few years research has brought up new knowledge on the fundamental biology of HIV-virus which is leading to new antiviral drugs and strategies for vaccine design. In spite of these substantial advances, an effective vaccine does not yet exist. Only attenuated (that is live but weakened) HIV-strains has been able to provide immunity in primate studies even though they will never reach a required safety profile suitable for mass vaccination.

[0007] The replication process for HIV-1 has an error rate of about one per 10,000 base pairs. Since the entire viral genome is just under 10,000 base pairs, it is estimated that on average one error is introduced into the HIV-1 genome at each viral replication cycle.

[0008] This high mutation rate contributes to extensive variability of the viruses inside any one person and an even wider variability across populations.

[0009] This variability has resulted in three HIV-1 variants being described, and the subspecies of virus called “clades.” The distinctions are based on the structure of the envelope proteins, which are especially variable. The M (for major) variant is by far the most prevalent world wide. Within the M variant are clades A, B. C, D, E, F. G H. I, J and K, with clades A through E representing the vast majority of infections globally. Clades A, C and D are dominant in Africa, while clade B is the most prevalent in Europe, North and South America and Southeast Asia. Clades E and C are dominant in Asia. These clades differ by as much as 35%. Another variant is clade O, which is observed in Cameroun isolates of HIV-1. The greatest variation in structure is seen in the envelope proteins gp120 and gp41. There are two important results from the very high mutation rate of HIV-1 that have profound consequences for the epidemic. First, the high mutation rate is one of the mechanisms that allow the virus to escape from control by drug therapies. These new viruses represent resistant strains. The high mutation rate also allows the virus to escape the patient's immune system by altering the structures that are recognized by immune components. An added consequence of this extensive variability is that the virus can also escape from control by vaccines, and therefore makes it difficult to find vaccines based on envelope proteins which are effective.

[0010] Moreover, the virus produces proteins having immunosuppressive properties, allowing to escape the patient's immune system survey. Thus, cell expressing such proteins become “invisible” to the immune system.

[0011] Consequently for a vaccine, there is a need to provide proteins as antigens having lost, or substantially lost, their immunosuppressive functions, in order to generate an efficient response. This will enable the individuals once infected by the virus to allow the immune system to destroy the infected cells and prevent/cure the infection.

[0012] Prior art has already intended to provide such proteins.

[0013] For instance, the international application WO 2005/095,442 (Inventors: Renard, Mangeney & Heidmann) discloses mutations in the immunosuppressive domains of endogenous retroviruses (ERV) or onco retroviruses, such as HTLV or FeLV, ENV proteins. This document demonstrates that mutations at a specific position abolish the immunosuppressive properties of ENV proteins of ERV or onco retroviruses. However, the international application WO 2005/095, 442 never mentions or suggests that the mutations made in the immunosuppressive domain of ERV- or onco retroviruses ENV proteins can be transposable to lentiviral ENV proteins.

[0014] The international application WO 2010/022,740 discloses an extremely wide consensus sequence of a region of HIV ENV protein, described as follows:

X(1-22)-C(23)-X(24-28)-C(29)-(X30-50)

wherein the amino acid residues of the consensus sequence are selected from the groups of residues consisting of:

### X(1): L, S, R, P, F, A, V, M, and I; and

### X(2): Q, R, K, H, L, M, and P; and

### X(3): A, T, V, H, S, R, Q, G, M, and E; and

### X(4): R, K, G, E, T, S, C, M, and H; and

### X(5): V, I, L, D, A, S, F, M, and G; and

### X(6): L, Q, V, M, P, W, T, and I; and

### X(7): A, S, T, V, L, G, F, D, M, and E; and

### X(8): V, L, I, M, A, W, K, G, and E; and

### X(9): E, K, G, D, A, V, M, and F; and

### X(10): X; and

### X(11): Y, L, F, H, C, I, T, M, and N; and

### X(12): L, I, V, M, Q, P, T, Y, and A; and

### X(13): K, R, Q, G, S, E, H, W, T, V, M, N, Z, Y, A, P, and C; and

### X(14): D, N, G, E, Y, V, S, H, A, M, and I; and

### X(15): Q, R, H, K, P, L, M, and N; and

### X(16): Q, K, R, T, H, E, S, P, M, and L; and

### X(17): L, F, I, R, V, P, S, M, and H, and

### X(18): L, M, P, I, H, and S; and

### X(19): X; and

### X(20): I, L, M, V, S, F, T, D, A, R, P, and J; and

### X(21): W, R, G, F, L, M, and T; and

### X(22): G, D, A, R, M, and C; and

### X(24): X; and

### X(25): G, R, E, N, A, M, and D; and

### X(26): K, R, N, E, Q, T, S, I, M, and G; and

### X(27): L, H, I, T, V, F, R, Q, S, P, A, J, M, and Y; and

### X(28): I, V, T, L, R, F and M; and

### X(30): T, P, Y, A, N, S, I, V, R, L, M, and H; and

### X(31): T, S, P, N, M and I; and

### X(32): A, N, T, S, D, R, FQ, P, I, E, V, M, L, K, H, C, and B; and

### X(33): V, A, L, M, G, R, and C; and

### X(34): X; and

### X(35): W, R, G, L, M, and P; and

### X(36): N, S, D, B, K, E, R, Q, M, and G; and

### X(37): S, T, A, N, D, V, I, E, Y, K, L, R, G, P, M, F, W, H, Q, B, and C; and

### X(38): S, T, N, I, G, R, L, C, A, W, M and E; and

### X(39): W, G, A, R, E, C, Y, V, S, M, and H; and

### X(40): X; and

### X(41): N, G, K, S, D, E, T, R, H, P, A, B, V, Q, Y, M, and I; and

### X(42): K, R, N, D, S, T, G, E, I, V, Y, Q, P, H, A, W, M, and C, and

### X(43): S, T, N, K, I, R, D, E, P, L, A, W, G, M, H, Y, F, V, and C,

### X(44): L, Y, Q, F, E, H, S, V, K, M, T, I, W, N, D, R, P, A, and G; and

### X(45): D, E, N, S, T, K, G, L, A, Q, H, I, Y, B, R, V, P, M, F, W, Z, and C; and

### X(46): E, D, Q, Y, K, N, T, S, A, W, H, M, R, I, G, L, V, Z, F, B, and P; and

### X(47): I, D, E, M, G, T, Q, S, W, L, N, Y, K, V, R, F, A, P, and H, and

### X(48): W, I, T, N, D, E, L, G, S, Y, R, V, K, H, A, Q, M, and F; and

### X((49): D, N, E, G, W, Q, K, H, L, B, S, I, Y, T, A, R, M, Z, and V; and

### X(50): N, D, T, K, S, H, L, G, E, W, I, Q, M, R, B, Y, P, and A;

[0015] This consensus sequence contains 50 amino acids, in which the specific amino acids in position 10, 19, 24, 34 and 40 are defined as affecting the immunogenic properties of a HIV-1 envelope polypeptide, and the 45 remaining positions are randomly defined including the most common amino acids of wild-type HIV ENV proteins.

[0016] In fact, the teaching of WO 2010/022,740 is a transposition from endogenous retroviruses (ERV) or onco retroviruses to lentivirus on the basis of the teaching of WO 2005/095,442 (Inventors: Renard, Mangeney & Heidmann), but said transposition is inappropriate in the case of lentivirus, as shown by the Inventor of the present invention.

[0017] Briefly speaking, Dr Heidmann is an Inventor in WO 2005/095,442 and in the present invention. As a matter of fact, the effects of the mutations described in WO 2005/095,442 were also tested in lentivirus by the Inventor of the present invention, but no effect was observed when the mutations identified in endogenous retroviruses or onco retroviruses were transposed into ENV protein of lentivirus.

[0018] Moreover, since any amino acid can be assigned to the positions 10, 19, 24, 34 or 40 in the consensus sequence, WO 2010/022,740 teaches that such mutations can be effective using any amino acid residue. This teaching is in contradiction with the present invention, showing that the immunosuppressive properties of HIV-1 ENV protein are only affected by specific mutations that are defined not only by their position, but also by the nature of the substituted amino acid residues.

[0019] Furthermore, WO 2010/022,740 discloses experimental results for only one specific mutation within the immunosuppressive domain of HIV ENV protein, as defined by the 50 amino acids consensus sequence. The mutation, a substitution by R as the only one exemplified in the international application WO 2010/022,740, occurs at the amino acid in position 19, which again is equivalent to the position disclosed in the international application WO 2005/095,442 if one simply aligns ENV sequences (see FIG. 3 in WO 2010/022,740, which is a copy of FIG. 3 in Benit et al. 2001, Journal of Virology, Vol. 75, No. 23, p. 11709-11719) (Of note not only the position of the amino acid, but also the nature of the substitution (by arginine) is similar to the one described in WO 2005/095,442).

[0020] More specifically, when aligning the ENV sequences respectively of an endogenous retrovirus or onco retrovirus and a lentivirus, according to FIG. 3 of Benit et al.:

[chemical structure]

it appears that the position 19 in lentivirus corresponds to the position in WO 2005/095,442 where a specific substitution into arginine, E→R for endogenous or onco retrovirus, results in loss of immunosuppressive activity.

[0021] The international application WO 2010/022,740 discloses that said mutated HIV ENV protein inhibits proliferation of PBMC ex vivo, but such ex vivo result has no in vivo predictive value.

[0022] However, WO 2010/022,740 never discloses or suggests that mutants are efficient in vivo, i.e. that cell expressing mutants are detected by the immune system.

[0023] Moreover, as disclosed hereafter, such mutations are not efficient in vivo. Indeed, results disclosed hereafter in the example section relative to the present invention demonstrate that said substitution G19R does not inhibit in vivo the immunosuppressive properties of the ENV protein.

[0024] As a consequence, WO 2010/022,740 raises the same technical problem as the present invention, but does not offer an appropriate technical solution. This prior art reveals the difficulties to overcome the identification of the effective mutations affecting the immunosuppressive properties of the lentiviral ENV proteins.

[0025] Thus, the provision of in vivo effective non immunosuppressive lentiviral ENV proteins remains.

[0026] One aim of the invention is to provide new mutated ENV proteins devoid of immunosuppressive properties.

[0027] Another aim of the invention is to provide a new pharmaceutical composition efficient for treating lentiviral infection.

[0028] Another aim of the invention is to provide an efficient vaccine.

[0029] The invention relates to a pharmaceutical composition comprising as active substance:
[0030] a) an isolated mutated human or simian lentiviral ENV protein having substantially no immunosuppressive activity,
[0031] said mutated human or simian lentiviral ENV protein resulting from mutation of the transmembrane (TM) subunit of a wild type human or simian lentiviral ENV protein,
[0032] said mutated human or simian lentiviral ENV protein having at least 70% identity, preferably at least 80% identity, to one sequence chosen from the group consisting of SEQ ID NO: 216, SEQ ID NO: 420 and SEQ ID NO: 421,
[0033] said mutated human or simian lentiviral ENV protein comprising a mutated immunosuppressive domain (ISU) containing the following amino acid sequence:

| | |
|---|---|
| A-[I/V]-E-[K/R]-Xₐ-X_{b}-X-D-Q, | (SEQ ID NO: 416) |

[0034] wherein,
[0035] X represents any amino acid,
   [0036] and either
[0037] Xₐ is A, F, G, L, R or deleted, and X_{b} is C, D, E, H, I, K, L, M, N, P, Q, S, T, V, W or Y, or
[0038] Xₐ is C, D, E, H, I, K, M, N, P, Q, S, T, V, W or Y, and X_{b} is A, F, G, R or deleted,
[0039] or
[0040] Xₐ is A, F, G, L, R or deleted, and X_{b} is A, F, G, R or deleted,
[0041] or
[0042] b) at least one fragment of said isolated mutated human or simian lentiviral ENV protein having substantially no immunosuppressive activity,
[0043] said fragment comprising at least 40 amino acids,
[0044] said fragment comprising a mutated immunosuppressive domain (ISU) containing the following amino acid sequence:

| | |
|---|---|
| A-[I/V]-E-[K/R]-Xₐ-X_{b}-X-D-Q, | (SEQ ID NO: 416) |

[0045] wherein,
[0046] X represents any amino acid,
   [0047] and either
[0048] Xₐ is A, F, G, L, R or deleted, and X_{b} is C, D, E, H, I, K, L, M, N, P, Q, S, T, V, W or Y, or
[0049] Xₐ is C, D, E, H, I, K, M, N, P, Q, S, T, V, W or Y, and X_{b} is A, F, G, R or deleted,
[0050] or
[0051] Xₐ is A, F, G, L, R or deleted, and X_{b} is A, F, G, R or deleted,
[0052] in association with a pharmaceutically acceptable carrier,
[0053] said substantial absence of immunosuppressive activity of the above mentioned mutated human or simian lentiviral ENV protein or of the above defined fragment being liable to be assessed by the fact that in an in vivo assay involving engrafted tumor cells rejection,
[0054] said tumor cells being transduced either so as to express said mutated ENV protein or said fragment (“mutated ENV tumor cells”),
[0055] or said tumor cells being transduced so as to express said wild type ENV protein or a fragment thereof (“wild type ENV tumor cells”),
[0056] or said tumor cells being not transduced (“normal tumor cells”), the following ratio:
[0057] immunosuppression index of said mutated ENV protein or of said fragment (i_{mutated env})/immunosuppression index of wild type ENV protein (i_{wild type env}) is less than 0.5,
[0058] i_{mutated env} being defined by: (maximum area reached by mutated ENV tumor cells−maximum area reached by normal tumor cells)/(maximum area reached by normal tumor cells), and
[0059] i_{wild type env} being defined by: (maximum area reached by wild type ENV tumor cells−maximum area reached by normal tumor cells)/(maximum area reached by normal tumor cells).

[0060] The present application is based on the unexpected observation made by the Inventors that some specific amino acids of the immunosuppressive domain of a lentiviral ENV protein can be mutated conferring to said lentiviral ENV protein essentially no immunosuppressive properties, or no immunosuppressive properties, while retaining its antigenicity, the three-dimensional structure of the immunosuppressive domain, and its expression at the plasma membrane. Moreover, the mutated lentiviral ENV protein according to the invention does not alter the infectivity of a virus expressing it.

[0061] In the invention, the “mutated simian or human lentiviral ENV proteins” means that the ENV proteins derive from the expression of an env gene of a lentivirus of human or simian.

[0062] Lentiviruses according to the invention encompassed by the invention are HIV-1 and 2 and Simian immunodeficiency virus (SIV).

[0063] Because of the high mutation rate of HIV-1, HIV-2 and SIV viruses, the “mutated ENV protein”, as defined in the invention, encompasses two meanings.

[0064] According to the first meaning, the said “mutated ENV protein” is the unnatural result of the intervention of human beings.

[0065] According to the second meaning, the mutated ENV protein also encompasses naturally occurring variants for which up to now the non immunosuppressive properties remain unknown.

[0066] This second meaning takes into consideration the natural variability of HIV and SIV variants inside a same infected individual, wherein the said “mutated ENV protein” might be non immunosuppressive but its property is undetectable because an HIV infected patient always carries many HIV variants, the majority of which is immunosuppressive.

[0067] The three following proteins correspond to wild type sequences of the ENV protein of HIV-1, HIV-2 and SIV respectively. In the invention, they are considered as reference sequences of wild type ENV proteins.

| | |
|---|---|
| SEQ ID NO: 417 | MRVKEKYQHLWRWGWKWGTMLLGILMICSATEK |
| wild type HIV-1 | LWVTVYYGVPVWKEATTTLFCASDAKAYDTEVH |
| | NVWATHACVPTDPNPQEVVLVNVTENFNMWKND |
| | MVEQMHEDIISLWDQSLKPCVKLTPLCVSLKCT |
| | DLGNATNTNSSNTNSSSGEMMMEKGEIKNCSFN |
| | ISTSIRGKVQKEYAFFYKLDIIPIDNDTTSYTL |
| | TSCNTSVITQACPKVSFEPIPIHYCAPAGFAIL |
| | KCNNKTFNGTGPCTNVSTVQCTHGIRPVVSTQLL |
| | LNGSLAEEEVVIRSANFTDNAKTIIVQLNQSVE |
| | INCTRPNNNTRKSIRIQRGPGRAFVTIGKIGNMR |
| | QAHCNISRAKWNATLKQIASKLREQFGNNKTII |
| | FKQSSGGDPEIVTHSFNCGGEFFYCNSTQLF |
| | NSTWFNSTWSTEGSNNTEGSDTITLPCRIKQFI |
| | NMWQEVGKAMYAPPISGQIRCSSNITGLLLTRD |
| | GGNNNNGSEIFRPGGGDMRDNWRSELYKYKV |
| | VKIEPLGVAPTKAKRRVVQREKRAVGIGALFLG |
| | FLGAAGSTMGARSMTLTVQARQLLSGIVQQQN |
| | NLLRAIEAQQHLLQLTVWGIKQLQARILAVERYL |
| | KDQQLLGIWGCSGKLICTTAVPWNASWSNKSL |
| | EQIWNNMTWMEWDREINNYTSLIHSLIEESQNQ |
| | QEKNEQELLELDKWASLWNWFNITNWLWYIKIF |
| | IMIVGGLVGLRIVFAVLSIVNRVRQGYSPLSFQ |
| | THLPTPRGPDRPEGIEEEGGERDRDRSIRLVN |
| | GSLALIWDDLRSLCLFSYHRLRDLLLIVTRIVE |
| | LLGRRGWEALKYWWNLLQYWSQELKNSAVSLL |
| | NATAIAVAEGTDRVIEVVQGACRAIRHIPRRIRQ |
| | GLERILL |
| SEQ ID NO: 418 | MCGRNQLFVASLLASACLIYCVQYVTVFYGVPV |
| Wild type HIV-2 | WRNASIPLFCATKNRDTWGTIQCLPDNDDYQEI |
| | ALNVTEAFDAWNNTVTEQAVEDVWSLFETSIKP |
| | CVKLTPLCVAMRCNSTTAKNTTSTPTTTTTANT |
| | TIGENSSCIRTDNCTGLGEEEMVDCQFNMTGLE |
| | RDKKKLYNETWYSKDVVCESNDTKKEKTCYMNH |
| | CNTSVITESCDKHYWDTMRFRYCAPPGFALLRC |
| | NDTNYSGFEPNCSKVVAATCTRMMETQTSTWFG |
| | FNGTRAENRTYIYWHGRDNRTIISLNKFYNLTVH |
| | CKRPGNKTVVPITLMSGLVFHSQPINRRPRQA |
| | WCWFKGEWKEAMKEVKLTLAKHPRYKGTNDTEK |
| | IRFIAPGERSDPEVAYMWTNCRGEFLYCNMTWFL |
| | NWVENRTNQTQHNYVPCHIKQIINTWHKVGKNV |
| | YLPPREGQLTCNSTVTSIIANIDGGENQTNITFS |
| | AEVAELYRLELGDYKLIEVTPIGFAPTPVKRYSS |
| | APVRNKRGVFVLGFLGFLTTAGAAMGAASLTL |
| | SAQSRTLLAGIVQQQQQLLDVVKRQQEMLRLT |
| | VWGTKNLQARVTAIEKYLKDQAQLNSWGCAFR |
| | QVCHTTVPWVNDTLTPDWNNMTWQEWEQRIR |
| | NLEANISESLEQAQIQQEKNMYELQKLNSWDVF |
| | GNWFDLTSWIKYIQYGVYIVVGIIVLRIVIYVVQ |
| | MLSRLRKGYRPVFSSPPAYFQQIHIHKDREQPA |
| | REETEEDVGNSVGDNWWPWPIRYIHFLIRQLIRL |
| | LNRLYNICRDLLSRSFQTLQLISQSLRRALTAVR |
| | DWLRFNTAYLQYGGEWIQEAFRAFARATGETLT |
| | NAWRGFWGTLGQIGRGILAVPRRIRQGAEIALL |
| SEQ ID NO: 419 | MGCLGNQLLIAILLLSVYGIYCTLYVTVFYGVP |
| wild type SIV | AWRNATIPLFCATKNRDTWGTTQCLPDNGDYSE |
| mac239 | VALNVTESFDAWNNTVTEQAIEDVWQLFETSIK |
| | PCVKLSPLCITMRCNKSETDRWGLTKSITTTA |
| | STTSTTASAKVDMVNETSSCIAQDNCTGLEQE |
| | QMISCKFNMTGLKRDKKKEYNETWYSADLVCEQ |
| | GNNTGNESRCYMNHCNTSVIQESCDKHYWDAIR |
| | FRYCAPPGYALLRCNDTNYSGFMPKCSKVVVSS |
| | CTRMMETQTSTWFGFNGTRAENRTYIYWHGRDN |
| | RTIISLNKYYNLTMKCRRPGNKTVLPVTIMSGLV |
| | FHSQPINDRPKQAWCWFGGKWKDAIKEVKQTIV |
| | KHPRYTGTNNTDKINLTAPGGGDPEVTFMWTNCR |
| | GEFLYCKMNWFLNWVEDRNTANQKPKEQHKRN |
| | YVPCHIRQIINTWHKVGKNVYLPPREGDLTCNS |
| | TVTSLIANIDWIDGNQTNITMSAEVAELYRLELG |
| | DYKLVEITPIGLAPTDVKRYTTGGTSRNKRGVF |
| | VLGFLGFLATAGSAMGAASLTLTAQSRTLLAGI |
| | VQQQQQLLDVVKRQQELLRLTVWGTKNLQTR |
| | VTAIEKYLKDQAQLNAWGCAFRQVCHTTVPW |
| | PNASLTPKWNNETWQEWERKVDFLEENITALL |
| | EEAQIQQEKNMYELQKLNSWDVFGNWFDLAS |
| | WIKYIQYGVYIVVGVILLRIVIYIVQMLAKLRQ |
| | GYRPVFSSPPSYFQQTHIQQDPALPTREGK |
| | ERDGGEGGGNSSWPWQIEYIHFLIRQLIRLLTW |
| | LFSNCRTLLSRVYQILQPILQRLSATLQRIREV |
| | LRTELTYLQYGWSYFHEAVQAVWRSATETLAGA |
| | WGDLWETLRRGGRWILAIPRRIRQGLELTLL |

[0068] Variant in the invention encompasses SIV, HIV-1 and HIV-2 ENV proteins.

[0069] Variants of the HIV-1 mutated ENV proteins according to the invention have at least 70%, preferably at least 80%, more preferably at least 90% of identity with the wild type amino acid sequence of the HIV-1 ENV protein, and comprises the mutations as described above, and harbour no immunosuppressive activity.

[0070] Variants of the HIV-2 mutated ENV proteins according to the invention have at least 70%, preferably at least 80%, more preferably at least 90% of identity with the wild type amino acid sequence of the HIV-2 ENV protein, and comprises the mutations as described above, and harbour no immunosuppressive activity.

[0071] Variants of the SIV mutated ENV proteins according to the invention have at least 70%, preferably at least 80%, more preferably at least 90% of identity with the wild type amino acid sequence of the SIV ENV protein, and comprises the mutations as described above, and harbour no immunosuppressive activity.

[0072] The three following proteins (SEQ ID NO: 216, 420 and 421) correspond to three mutated sequences of the ENV protein of HIV-1, HIV-2 and SIV respectively. In the invention, they are considered as reference sequences of the mutated ENV proteins.

[0073] More specifically, SEQ ID NO: 216 corresponds to the SEQ ID NO: 417 in which the amino acid residue Y in position 5 (Xₐ) of the sequence A-[I/V]-E-[K/R]-Xₐ-X_{b}-X-D-Q has been substituted by R.

[0074] SEQ ID NO: 420 corresponds to the SEQ ID NO: 418 in which the amino acid residue Y in position 5 (Xₐ) of the sequence A-[I/V]-E-[K/R]-Xₐ-X_{b}-X-D-Q has been substituted by R.

[0075] SEQ ID NO: 421 corresponds to the SEQ ID NO: 419 in which the amino acid residue Y in position 5 (Xₐ) of the sequence A-[I/V]-E-[K/R]-Xₐ-X_{b}-X-D-Q has been substituted by R.

| | |
|---|---|
| SEQ ID NO: 216 | MRVKEKYQHLWRWGWKWGTMLLGILMICSATEK |
| mutated HIV-1 | LWVTVYYGVPVWKEATTTLFCASDAKAYDTEVH |
| | NVWATHACVPTDPNPQEVVLVNVTENFNMWKND |
| | MVEQMHEDIISLWDQSLKPCVKLTPLCVSLKCT |
| | DLGNATNTNSSNTNSSSGEMMMEKGEIKNCSFN |
| | ISTSIRGKVQKEYAFFYKLDIIPIDNDTTSYTL |
| | TSCNTSVITQACPKVSFEPIPIHYCAPAGFAI |
| | LKCNNKTFNGTGPCTNVSTVQCTHGIRPVV |
| | STQLLLNGSLAEEEVVIRSANFTDNAKTIIVQ |
| | LNQSVEINCTRPNNNTRKSIRIQRGPGRAFV |
| | TIGKIGNMRQAHCNISRAKWNATLKQIASKL |
| | REQFGNNKTIIFKQSSGGDPEIVTHSFNCGG |
| | EFFYCNSTQLFNSTWFNSTWSTEGSNNTEGS |
| | DTITLPCRIKQFINMWQEVGKAMYAPPISGQIR |
| | CSSNITGLLLTRDGGNNNNGSEIFRPGGGDM |
| | RDNWRSELYKYKVVKIEPLGVAPTKAKRRVV |
| | QREKRAVGIGALFLGFLGAAGSTMGARSMTL |
| | TVQARQLLSGIVQQQNNLLRAIEAQQHLLQLT |
| | VWGIKQLQARILAVERRLKDQQLLGIWGCSG |
| | KLICTTAVPWNASWSNKSLEQIWNNMTWME |
| | WDREINNYTSLIHSLIEESQNQQEKNEQELLE |
| | LDKWASLWNWFNITNWLWYIKIFIMIVGGLVG |
| | LRIVFAVLSIVNRVRQGYSPLSFQTHLPTPRG |
| | PDRPEGIEEEGGERDRDRSIRLVNGSLALIW |
| | DDLRSLCLFSYHRLRDLLLIVTRIVELLGRRG |
| | WEALKYWWNLLQYWSQELKNSAVSLLNAT |
| | AIAVAEGTDRVIEVVQGACRAIRHIPRRIRQG |
| | LERILL |
| SEQ ID NO: 420 | MCGRNQLFVASLLASACLIYCVQYVTVFYGVPV |
| mutated HIV-2 | WRNASIPLFCATKNRDTWGTIQCLPDNDDYQEI |
| | ALNVTEAFDAWNNTVTEQAVEDVWSLFETSIKP |
| | CVKLTPLCVAMRCNSTTAKNTTSTPTTTTTANT |
| | TIGENSSCIRTDNCTGLGEEEMVDCQFNMTGLER |
| | DKKKLYNETWYSKDVVCESNDTKKEKTCYMN |
| | HCNTSVITESCDKHYWDTMRFRYCAPPGFALL |
| | RCNDTNYSGFEPNCSKVVAATCTRMMETQTS |
| | TWFGFNGTRAENRTYIYWHGRDNRTIISLNKFYN |
| | LTVHCKRPGNKTVVPITLMSGLVFHSQPINRRP |
| | RQAWCWFKGEWKEAMKEVKLTLAKHPRYKG |
| | TNDTEKIRFIAPGERSDPEVAYMWTNCRGEFL |
| | YCNMTWFLNWVENRTNQTQHNYVPCHIKQIINT |
| | WHKVGKNVYLPPREGQLTCNSTVTSIIANIDGG |
| | ENQTNITFSAEVAELYRLELGDYKLIEVTPIGFA |
| | PTPVKRYSSAPVRNKRGVFVLGFLGFLTTAGA |
| | AMGAASLTLSAQSRTLLAGIVQQQQQLLDVVK |
| | RQQEMLRLTVWGTKNLQARVTAIEKRLKDQAQ |
| | LNSWGCAFRQVCHTTVPWVNDTLTPDWNNM |
| | TWQEWEQRIRNLEANISESLEQAQIQQEKNMY |
| | ELQKLNSWDVFGNWFDLTSWIKYIQYGVYIVVG |
| | IIVLRIVIYVVQMLSRLRKGYRPVFSSPPAYFQ |
| | QIHIHKDREQPAREETEEDVGNSVGDNWWPWP |
| | IRYIHFLIRQLIRLLNRLYNICRDLLSRSFQTL |
| | QLISQSLRRALTAVRDWLRFNTAYLQYGGEW |
| | IQEAFRAFARATGETLTNAWRGFWGTLGQIG |
| | RGILAVPRRIRQGAEIALL |
| SEQ ID NO: 421 | MGCLGNQLLIAILLLSVYGIYCTLYVTVFYGVP |
| mutated SIV | AWRNATIPLFCATKNRDTWGTTQCLPDNGDYSE |
| mac239 | VALNVTESFDAWNNTVTEQAIEDVWQLFETSIK |
| | PCVKLSPLCITMRCNKSETDRWGLTKSITTTAS |
| | TTSTTASAKVDMVNETSSCIAQDNCTGLEQEQ |
| | MISCKFNMTGLKRDKKKEYNETWYSADLVCE |
| | QGNNTGNESRCYMNHCNTSVIQESCDKHYW |
| | DAIRFRYCAPPGYALLRCNDTNYSGFMPKCS |
| | KVVVSSCTRMMETQTSTWFGFNGTRAENRT |
| | YIYWHGRDNRTIISLNKYYNLTMKCRRPGNKTV |
| | LPVTIMSGLVFHSQPINDRPKQAWCWFGGK |
| | WKDAIKEVKQTIVKHPRYTGTNNTDKINLTAP |
| | GGGDPEVTFMWTNCRGEFLYCKMNWFLNW |
| | VEDRNTANQKPKEQHKRNYVPCHIRQIINTW |
| | HKVGKNVYLPPREGDLTCNSTVTSLIANIDWI |
| | DGNQTNITMSAEVAELYRLELGDYKLVEITPIG |
| | LAPTDVKRYTTGGTSRNKRGVFVLGFLGFL |
| | ATAGSAMGAASLTLTAQSRTLLAGIVQQQQQ |
| | LLDVVKRQQELLRLTVWGTKNLQTRVTAIEK |
| | RLKDQAQLNAWGCAFRQVCHTTVPWPNAS |
| | LTPKWNNETWQEWERKVDFLEENITALLEE |
| | AQIQQEKNMYELQKLNSWDVFGNWFDLAS |
| | WIKYIQYGVYIVVGVILLRIVIYIVQMLAKLRQ |
| | GYRPVFSSPPSYFQQTHIQQDPALPTREGKER |
| | DGGEGGGNSSWPWQIEYIHFLIRQLIRLLTW |
| | LFSNCRTLLSRVYQILQPILQRLSATLQRIRE |
| | VLRTELTYLQYGWSYFHEAVQAVWRSATE |
| | TLAGAWGDLWETLRRGGRWILAIPRRIRQG |
| | LELTLL |

[0076] The invention also encompasses the variants of the “mutated simian or human lentiviral ENV protein”, harbouring the above mentioned mutations, and conferring a lack of immunosuppressive properties to said variant.

[0077] Variants of the HIV-1 mutated ENV proteins according to the invention have at least 70%, preferably at least 80%, more preferably at least 90% of identity with the reference mutated sequence of HIV-1 ENV protein (SEQ ID NO: 216), and comprises the mutations as described above, and harbour no immunosuppressive activity.

[0078] Variants of the HIV-2 mutated ENV proteins according to the invention have at least 70%, preferably at least 80%, more preferably at least 90% of identity with the reference mutated sequence of the HIV-2 ENV protein (SEQ ID NO: 420), and comprises the mutations as described above, and harbour no immunosuppressive activity.

[0079] Variants of the SIV mutated ENV proteins according to the invention have at least 70%, preferably at least 80%, more preferably at least 90% of identity with the reference mutated sequence of the SIV ENV protein (SEQ ID NO: 421), and comprises the mutations as described above, and harbour no immunosuppressive activity.

[0080] The immunosuppressive domain (ISU) of the lentivirus according to the invention can be delimited by the sequence SEQ ID NO: 6,

(SEQ ID NO: 6)

xGIVQQQxxLLxxxxxxQxxLxLxxWGxKxLQxRxxA[I/V]E[K/R]Y
LxDQxxLx

in which x represents any amino acid.

[0081] SEQ ID NO: 6 corresponds to the non mutated ISU domain.

[0082] In this SEQ ID NO: 6, “x” (in small letters) is to be considered independently from “X” (in capital letters) used for the first time in SEQ ID NO: 416 of the present invention.

[0083] SEQ ID NO: 6 comprises SEQ ID NO: 1.

[0084] The most advantageous immunosuppressive domains of the wild type ENV proteins according to the invention comprise the following sequences:

[0085] HIV-1 ENV protein comprises the amino acid sequence AVERYLKDQ (SEQ ID NO: 7), HIV-2 ENV protein comprises the amino acid sequence AIEKYLKDQ (SEQ ID NO: 8), and

[0086] SIV ENV protein comprises the amino acid sequence SEQ ID NO: 7 or 8.

[0087] When applying the mutations as defined above, the ISU domain looses its immunosuppressive properties.

[0088] In said SEQ ID NO: 6, the underlined amino acids are the essential amino acids.

[0089] In the invention, the ISU domain, as defined by SEQ ID NO: 6, is the minimal essential domain of the ENV protein according to the invention which harbours an immunosuppressive activity.

Examples of wild type ISU domains:
HIV-1

| | |
|---|---|
| SGIVQQQNNLLRAIEAQQHLLQLTVWGIKQLQA | (SEQ ID NO: 366) |
| RILAVERYLKDQQLLG | |
| SGIVQQQNNLLRAIEAQQHLLKLTVWGIKQLQA | (SEQ ID NO: 367) |
| RILAVERYLKDQQLLG | |
| SGIVQQQNNLLRAIEAQQHLLQLTVWGIKQLQA | (SEQ ID NO: 368) |
| RVLAVERYLKDQQLLG | |
| SGIVQQQNNLLRAIEAQQHLLQLTVWGIKQLQA | (SEQ ID NO: 369) |
| RILAVERYLKDQQLLG | |
| SGIVQQQNNLLRAIEAQQQMLQLTVWGIKQLRA | (SEQ ID NO: 370) |
| RVLAVERYLRDQQLLG | |
| SGIVQQQSNLLRAIQARQHMLQLTVWGIKQLQA | (SEQ ID NO: 371) |
| RVLAVERYLRDQQLLG | |

SIV

| | |
|---|---|
| SGIVQQQNNLLKAIEAQQHLLQLSIWGVKQLQA | (SEQ ID NO: 372) |
| RLLAVERYLQDQQILG | |
| SGIVQQQNNLLRAIEAQQHLLQLSVWGIKQLQA | (SEQ ID NO: 373) |
| RVLAIERYLRDQQILG | |
| AGIVQQQQQLLDVVKRQQELLRLTVWGTKNLQT | (SEQ ID NO: 374) |
| RVSAIEKYLKDQAQLN | |
| AGIVQQQQQLLDVVKRQQELLRLTVWGTKNLQT | (SEQ ID NO: 375) |
| RVTAIEKYLKDQAQLN | |

HIV2

| | |
|---|---|
| AGIVQQQQQLLDVVKRQQEMLRLTVWGTKNLQA | (SEQ ID NO: 376) |
| RVTAIEKYLKDQAQLN | |
| AGIVQQQQQLLDVVKRQQELLRLTVWGTKNLQT | (SEQ ID NO: 377) |
| RVTAIEKYLKDQALLN | |

[0090] The localization of an ISU domain can be determined in all ENV proteins of viruses as described in Benit et al. 2001, Journal of Virology, Vol. 75, No. 23, p. 11709-11719. In a broad meaning, the ISU domain is defined by its structure and its localization, irrespective of the fact that it possesses or not an immunosuppressive activity.

[0091] In the invention, the ISU domain refers to a specific domain in which a mutation can affect the immunosuppressive property of the ENV protein.

[0092] The immunosuppressive property of the ENV protein is preferably measured using in vivo procedures, which are representative of the physiological environment.

[0093] The immunosuppressive properties of the mutated ENV proteins according to the invention are measured according to an in vivo procedure to assay the immunosuppressive activity of a ENV protein disclosed previously [Mangeney and Heidmann Proc Natl Acad Sci USA 1998; 95: 14920-14925; Mangeney et al. Proc Natl Acad Sci USA, 2007, 104(51):20534-9].

[0094] As a physiological test, this in vivo procedure is performed using ENV proteins, or fragment thereof, which are not associated to another component or carrier proteins, such as BSA.

[0095] Briefly, a wild-type (wild type lentiviral ENV protein) or modified nucleic acid expressing the protein to be tested (mutated lentiviral ENV protein) is transfected in tumour cell lines such as MCA 205 or C18.1 cell lines by known transfection methods. The tumour cells expressing the protein to be tested are then injected especially subcutaneous (s.c.) injection to a host, generally mice. Following said injection, the establishment of tumour or, to the contrary, its rejection, is determined and the tumour area is measured. Tumor establishment was determined by palpation and tumor area (mm²) was determined by measuring perpendicular tumor diameters. Immunosuppression index is defined as i=(Sₑₙᵥ−Sₙₒₙₑ)/Sₙₒₙₑ, wherein Sₑₙᵥ is the maximum area reached by a tumour expressing an envelope protein and Sₙₒₙₑ is the maximum area reached by a tumour not expressing ENV protein (negative control).

[0096] According to an embodiment of the invention, the above defined ratio relative to the immunosuppressive index can be less than 0.2, and can even have a negative value (see FIGS. 2 and 3).

[0097] In vitro assay could be carried out, using high doses of synthetic peptides but they are indirect and less convincing, since the expression “immunosuppressive” is relevant when applied to animals possessing a complete immune system and not to cell lines.

[0098] An additional difficulty for the functional characterization of an ISU domain relies on the fact that the ISU carried by the retroviral ENV proteins is a highly structured proteic domain, with trimer formation within the complete ENV proteins (Caffrey M., Biochimica et Biophysica Acta, 1536:116-122, 2001; Caffrey et al., The EMBO Journal, Vol. 17, No. 16, p. 4572-4584, 1998). Such structures are not naturally formed with ISU peptides of limited length, and this is most probably why most studies carried out with peptides provide irrelevant results and/or are dependent on specific coupling of the peptides to carrier proteins (such as BSA, e.g. Denner et al., Current Science, AIDS 1994, 8:1063-1072).

[0099] As mentioned above, the ENV proteins according to the invention are mutated. This mutation is made in vitro. Thus, the mutated ENV proteins according to the invention are isolated, and does not correspond to naturally occurring counterpart.

[0100] As mentioned above, the lentiviral mutated ENV proteins are substantially devoid of immunosuppressive properties. This means that the mutated ENV proteins according to the invention have no, or have reduced immunosuppressive properties with respect to the natural non mutated ENV protein from a virus of the same species. For instance, a mutated HIV ENV protein according to the invention has reduced immunosuppressive properties with respect to the wild type HIV ENV protein.

[0101] In the invention, the terms “substantially devoid of immunosuppressive properties” means that the mutated ENV proteins according to the invention have an immunosuppressive index less than about 0.2 [Mangeney and Heidmann Proc Natl Acad Sci USA 1998; 95: 14920-14925; Mangeney et al. Proc Natl Acad Sci USA, 2007, 104(51):20534-9].

[0102] In the invention, structures responsible for the antigenicity of the mutated lentiviral ENV protein are essentially preserved.

[0103] As intended herein, the expression “structures responsible for antigenicity” relates to structures of the protein which are liable to interact with components of the immune system such as antibodies or membrane receptors of immune cells, in particular T cells.

[0104] The mutation(s) within the immunosuppressive domain of the lentiviral ENV proteins is (are) sufficient to decrease the immunosuppressive activity of the mutated lentiviral ENV protein with respect to the corresponding wild type ENV. However, it might be advantageous that another amino acid be also mutated because it ensures that the structure of the mutated ENV protein is essentially conserved with respect to the corresponding wild type ENV protein.

[0105] The mutated lentiviral ENV protein has substantially retained the structure, especially the antigenic structure, e.g., immunogenic determinants, of the original determined lentiviral ENV protein, i.e. the wild type non mutated lentiviral ENV protein.

[0106] These properties can be evaluated by measuring the fusion and/or infectious properties of said mutated lentiviral ENV with respect to the same properties in the wild type non mutated lentiviral ENV protein (see example).

[0107] Generally speaking, the mutated ENV protein involved in the present invention has an average length of about 700 to about 950 amino acids.

[0108] The invention encompasses fragments of the mutated ENV protein as defined above, provided that said fragment:
[0109] comprises at least the sequence SEQ ID NO: 2, as defined above,
[0110] comprises at least 40 amino acids, preferably comprises at least 50 amino acids,
[0111] is substantially devoid of immunosuppressive properties, as defined above,
[0112] preferably, comprises the extracellular parts of the ENV protein,
[0113] retains the structure of the ENV protein from which it derives,
[0114] harbours the same epitopes as the corresponding fragment in the wild type ENV protein.

[0115] According to a particular embodiment, the fragment of the mutated ENV protein of the invention can comprise about 40, 50, 100, 150, 200, 250, 300, 350, 400, 450, 500, 550, 600, 650 or 700 amino acids. These values are given only in an illustrative way, as the man skilled in the art will understand that the fragment can comprise any number of amino acids comprised between 40 and 700.

[0116] Advantageously, the fragments according to the invention are such that, while retaining the antigenic structure of the full length mutated ENV protein, and thus of the wild type ENV protein, they have lost major antigenic regions that are responsible for antigenicity in another region than the region corresponding to the immunosuppressive domain.

[0117] The invention also relates to a pharmaceutical composition comprising as active substance:

a) an isolated non naturally occurring mutated human or simian lentiviral ENV protein having substantially no immunosuppressive activity,
said mutated human or simian lentiviral ENV protein resulting from mutation of the transmembrane (TM) subunit of a wild type human or simian lentiviral ENV protein,
said mutated human or simian lentiviral ENV protein having at least 70% identity, preferably at least 80% identity, to one sequence chosen from the group consisting of SEQ ID NO: 216, SEQ ID NO: 420 and SEQ ID NO: 421,
said mutated human or simian lentiviral ENV protein comprising a mutated immunosuppressive domain (ISU) containing the following amino acid sequence:

| | |
|---|---|
| A-[I/V]-E-[K/R]-Xₐ-X_{b}-X-D-Q, | (SEQ ID NO: 416) |

wherein,
X represents any amino acid,
[0118] and either
   Xₐ is A, F, G, L, R or deleted, and X_{b} is C, D, E, H, I, K, L, M, N, P, Q, S, T, V, W or Y, or
   Xₐ is C, D, E, H, I, K, M, N, P, Q, S, T, V, W or Y, and X_{b} is A, F, G, R or deleted, or
   Xₐ is A, F, G, L, R or deleted, and X_{b} is A, F, G, R or deleted,
[0119] or
   b) at least one fragment of said isolated mutated human or simian lentiviral ENV protein having substantially no immunosuppressive activity,
   said fragment comprising at least 40 amino acids,
   said fragment comprising a mutated immunosuppressive domain (ISU) containing the following amino acid sequence:

| | |
|---|---|
| A-[I/V]-E-[K/R]-Xₐ-X_{b}-X-D-Q, | (SEQ ID NO: 416) |

wherein,
X represents any amino acid,
[0120] and either
   Xₐ is A, F, G, L, R or deleted, and X_{b} is C, D, E, H, I, K, L, M, N, P, Q, S, T, V, W or Y, or
   Xₐ is C, D, E, H, I, K, M, N, P, Q, S, T, V, W or Y, and X_{b} is A, F, G, R or deleted, or Xₐ is A, F, G, L, R or deleted, and X_{b} is A, F, G, R or deleted,
[0121] in association with a pharmaceutically acceptable carrier,
   said substantial absence of immunosuppressive activity of the above mentioned mutated human or simian lentiviral ENV protein or of the above defined fragment being liable to be assessed by the fact that in an in vivo assay involving engrafted tumor cells rejection,
   said tumor cells being transduced either so as to express said mutated ENV protein or said fragment (“mutated ENV tumor cells”),
   or said tumor cells being transduced so as to express said wild type ENV protein or a fragment thereof (“wild type ENV tumor cells”),
   or said tumor cells being not transduced (“normal tumor cells”),
   the following ratio:
   immunosuppression index of said mutated ENV protein or of said fragment (i_{mutated env})/immunosuppression index of wild type ENV protein (i_{wild type env}) is less than 0.5,
   i_{mutated env} being defined by: (maximum area reached by mutated ENV tumor cells−maximum area reached by normal tumor cells)/(maximum area reached by normal tumor cells), and
   i_{wild type env} being defined by: (maximum area reached by wild type ENV tumor cells−maximum area reached by normal tumor cells)/(maximum area reached by normal tumor cells).

[0122] In a particular embodiment, the invention relates to a pharmaceutical composition as defined above comprising as active substance:
[0123] a) an isolated mutated human or simian lentiviral ENV protein having substantially no immunosuppressive activity,
[0124] said mutated human or simian lentiviral ENV protein resulting from mutation of the transmembrane (TM) subunit of a wild type human or simian lentiviral ENV protein,
[0125] said mutated human or simian lentiviral ENV protein comprising a mutated immunosuppressive domain (ISU) containing the following amino acid sequence:

| | |
|---|---|
| A-[I/V]-E-[K/R]-Xₐ-X_{b}-X-D-Q, | (SEQ ID NO: 416) |

[0126] wherein,
[0127] X represents any amino acid,
   [0128] and either
[0129] Xₐ is A, F, G, L or R, and X_{b} is C, D, E, H, I, K, L, M, N, P, Q, S, T, V, W or Y, or Xₐ is C, D, E, H, I, K, M, N, P, Q, S, T, V, W or Y, and X_{b} is A, F, G or R, or
[0130] Xₐ is A, F, G, L or R, and X_{b} is A, F, G or R,
[0131] or
[0132] b) at least one fragment of said isolated mutated human or simian lentiviral ENV protein having substantially no immunosuppressive activity,
[0133] said fragment comprising at least 40 amino acids,
[0134] said fragment comprising a mutated immunosuppressive domain (ISU) containing the following amino acid sequence:

| | |
|---|---|
| A-[I/V]-E-[K/R]-Xₐ-X_{b}-X-D-Q, | (SEQ ID NO: 416) |

[0135] wherein,
[0136] X represents any amino acid,
   [0137] and either
[0138] Xₐ is A, F, G, L or R, and X_{b} is C, D, E, H, I, K, L, M, N, P, Q, S, T, V, W or Y, or Xₐ is C, D, E, H, I, K, M, N, P, Q, S, T, V, W or Y, and X_{b} is A, F, G or R, or
[0139] Xₐ is A, F, G, L or R, and X_{b} is A, F, G or R, in association with a pharmaceutically acceptable carrier.
[0140] The invention relates to a pharmaceutical composition as defined above comprising as active substance:
[0141] a) an isolated mutated human or simian lentiviral ENV protein having substantially no immunosuppressive activity,
[0142] said mutated human or simian lentiviral ENV protein resulting from mutation of the transmembrane (TM) subunit of a wild type human or simian lentiviral ENV protein,
[0143] said mutated human or simian lentiviral ENV protein comprising a mutated immunosuppressive domain (ISU) containing the following amino acid sequence:

| | |
|---|---|
| A-[I/V]-E-[K/R]-Xₐ-X_{b}-X-D-Q, | (SEQ ID NO: 416) |

[0144] wherein
[0145] X represents any amino acid,
   [0146] and either
[0147] Xₐ is A, F, G, L or R, and X_{b} is L, I, V, M or P, or
[0148] Xₐ is Y, I, H, C or T, and X_{b} is A, F, G or R, or
[0149] Xₐ is A, F, G, L or R, and X_{b} is A, F, G or R,
[0150] or
[0151] b) at least one fragment of said isolated mutated human or simian lentiviral ENV protein having substantially no immunosuppressive activity,
[0152] said fragment comprising at least 40 amino acids,
[0153] said fragment comprising a mutated immunosuppressive domain (ISU) containing the following amino acid sequence:

| | |
|---|---|
| A-[I/V]-E-[K/R]-Xₐ-X_{b}-X-D-Q, | (SEQ ID NO: 416) |

[0154] wherein
[0155] X represents any amino acid,
   [0156] and either
[0157] Xₐ is A, F, G, L or R, and X_{b} is L, I, V, M or P, or
[0158] Xₐ is Y, I, H, C or T, and X_{b} is A, F, G or R, or
[0159] Xₐ is A, F, G, L or R, and X_{b} is A, F, G or R,
[0160] in association with a pharmaceutically acceptable carrier.

[0161] According to a particular embodiment, the invention relates to a pharmaceutical composition as defined above comprising as active substance:
[0162] a) an isolated mutated human or simian lentiviral ENV protein having substantially no immunosuppressive activity,
[0163] said mutated human or simian lentiviral ENV protein resulting from mutation of the transmembrane (TM) subunit of a wild type human or simian lentiviral ENV protein,
[0164] said mutated human or simian lentiviral ENV protein comprising a mutated immunosuppressive domain (ISU) containing the following amino acid sequence:

| | |
|---|---|
| A-[I/V]-E-[K/R]-Xₐ-X_{b}-X-D-Q, | (SEQ ID NO: 416) |

[0165] wherein
[0166] X represents any amino acid,
   [0167] and either
[0168] Xₐ is A, G, or R, and X_{b} is C, D, E, H, I, K, L, M, N, P, Q, S, T, V, W or Y, or
[0169] Xₐ is C, D, E, H, I, K, M, N, P, Q, S, T, V, W or Y, and X_{b} is F, G or R,
[0170] or
[0171] Xₐ is F or L, and X_{b} is F, G or R,
[0172] or
[0173] Xₐ is A, G or R, and X_{b} is A,
[0174] or
[0175] Xₐ is A, G or R, and X_{b} is F, G or R,
[0176] or
[0177] b) at least one fragment of said isolated mutated human or simian lentiviral ENV protein having substantially no immunosuppressive activity,
[0178] said fragment comprising at least 40 amino acids,
[0179] said fragment comprising a mutated immunosuppressive domain (ISU) containing the following amino acid sequence:

| | |
|---|---|
| A-[I/V]-E-[K/R]-Xₐ-X_{b}-X-D-Q, | (SEQ ID NO: 416) |

[0180] wherein
[0181] X represents any amino acid,
   [0182] and either
[0183] Xₐ is A, G, or R, and X_{b} is C, D, E, H, I, K, L, M, N, P, Q, S, T, V, W or Y, or
[0184] Xₐ is C, D, E, H, I, K, M, N, P, Q, S, T, V, W or Y, and X_{b} is F, G or R,
[0185] or
[0186] Xₐ is F or L, and X_{b} is F, G or R,
[0187] or
[0188] Xₐ is A, G or R, and X_{b} is A,
[0189] or
[0190] Xₐ is A, G or R, and X_{b} is F, G, R,
[0191] in association with a pharmaceutically acceptable carrier.

[0192] According to a particular embodiment, the invention relates to a pharmaceutical composition as defined above comprising as active substance:
[0193] a) an isolated mutated human or simian lentiviral ENV protein having substantially no immunosuppressive activity,
[0194] said mutated human or simian lentiviral ENV protein resulting from mutation of the transmembrane (TM) subunit of a wild type human or simian lentiviral ENV protein,
[0195] said mutated human or simian lentiviral ENV protein comprising a mutated immunosuppressive domain (ISU) containing the following amino acid sequence:

| | |
|---|---|
| A-[I/V]-E-[K/R]-Xₐ-X_{b}-X-D-Q, | (SEQ ID NO: 416) |

[0196] wherein
[0197] X represents any amino acid,
   [0198] and either
[0199] Xₐ is A, G, or R, and X_{b} is L, I, V, M or P,
[0200] or
[0201] Xₐ is Y, I, H, C or T, and X_{b} is F, G or R,
[0202] or
[0203] Xₐ is F or L, and X_{b} is F, G or R,
[0204] or
[0205] Xₐ is A, G or R, and X_{b} is A,
[0206] or
[0207] Xₐ is A, G or R, and X_{b} is F, G or R,
[0208] or
[0209] b) at least one fragment of said isolated mutated human or simian lentiviral ENV protein having substantially no immunosuppressive activity,
[0210] said fragment comprising at least 40 amino acids,
[0211] said fragment comprising a mutated immunosuppressive domain (ISU) containing the following amino acid sequence:

| | |
|---|---|
| A-[I/V]-E-[K/R]-Xₐ-X_{b}-X-D-Q, | (SEQ ID NO: 416) |

[0212] wherein
[0213] X represents any amino acid,
   [0214] and either
[0215] Xₐ is A, G, or R, and X_{b} is L, I, V, M or P,
[0216] or
[0217] Xₐ is Y, I, H, C or T, and X_{b} is F, G or R,
[0218] or
[0219] Xₐ is F or L, and X_{b} is F, G or R,
[0220] or
[0221] Xₐ is A, G or R, and X_{b} is A,
[0222] or
[0223] Xₐ is A, G or R, and X_{b} is F, G or R,
[0224] in association with a pharmaceutically acceptable carrier.

[0225] According to another particular embodiment, the invention also relates to a pharmaceutical composition as defined above comprising as active substance:
[0226] a) an isolated mutated human or simian lentiviral ENV protein having substantially no immunosuppressive activity,
[0227] said mutated human or simian lentiviral ENV protein resulting from mutation of the transmembrane (TM) subunit of a wild type human or simian lentiviral ENV protein,
[0228] said mutated human or simian lentiviral ENV protein comprising a mutated immunosuppressive domain (ISU) containing the following amino acid sequence:

| | |
|---|---|
| A-[I/V]-E-[K/R]-Xₐ-X_{b}-X-D-Q, | (SEQ ID NO: 416) |

[0229] wherein,
[0230] X represents any amino acid,
   [0231] and either
[0232] Xₐ is A, G, or R, and X_{b} is C, D, E, H, I, K, L, M, N, P, Q, S, T, V, W or Y,
[0233] or
[0234] Xₐ is C, D, E, H, I, K, M, N, P, Q, S, T, V, W or Y, and X_{b} is F, G or R,
[0235] or
[0236] b) at least one fragment of said isolated mutated human or simian lentiviral ENV protein having substantially no immunosuppressive activity,
[0237] said fragment comprising at least 40 amino acids,
[0238] said fragment comprising a mutated immunosuppressive domain (ISU) containing the following amino acid sequence:

| | |
|---|---|
| A-[I/V]-E-[K/R]-Xₐ-X_{b}-X-D-Q, | (SEQ ID NO: 416) |

[0239] wherein,
[0240] X represents any amino acid,
   [0241] and either
[0242] Xₐ is A, G, or R, and X_{b} is C, D, E, H, I, K, L, M, N, P, Q, S, T, V, W or Y,
[0243] or
[0244] Xₐ is C, D, E, H, I, K, M, N, P, Q, S, T, V, W or Y, and X_{b} is F, G or R,
[0245] in association with a pharmaceutically acceptable carrier.

[0246] According to another particular embodiment, the invention relates to a pharmaceutical composition as defined above, comprising as active substance:
[0247] a) an isolated mutated human or simian lentiviral ENV protein having substantially no immunosuppressive activity,
[0248] said mutated human or simian lentiviral ENV protein resulting from mutation of the transmembrane (TM) subunit of a wild type human or simian lentiviral ENV protein,
[0249] said mutated human or simian lentiviral ENV protein comprising a mutated immunosuppressive domain (ISU) containing the following amino acid sequence:

| | |
|---|---|
| A-[I/V]-E-[K/R]-Xₐ-X_{b}-X-D-Q, | (SEQ ID NO: 416) |

[0250] wherein,
[0251] X represents any amino acid,
   [0252] and either
[0253] Xₐ is A, G, or R, and X_{b} is L, I, V, M or P,
[0254] or
[0255] Xₐ is Y, I, H, C or T, and X_{b} is F, G or R,
[0256] or
[0257] b) at least one fragment of said isolated mutated human or simian lentiviral ENV protein having substantially no immunosuppressive activity,
[0258] said fragment comprising at least 40 amino acids,
[0259] said fragment comprising a mutated immunosuppressive domain (ISU) containing the following amino acid sequence:

| | |
|---|---|
| A-[I/V]-E-[K/R]-Xₐ-X_{b}-X-D-Q, | (SEQ ID NO: 416) |

[0260] wherein,
[0261] X represents any amino acid,
   [0262] and either
[0263] Xₐ is A, G, or R, and X_{b} is L, I, V, M or P,
[0264] or
[0265] Xₐ is Y, I, H, C or T, and X_{b} is F, G or R,
[0266] in association with a pharmaceutically acceptable carrier.

[0267] According to another particular embodiment, the invention relates to a pharmaceutical composition as defined above,
[0268] wherein
[0269] Xₐ is R, and X_{b} is C, D, E, H, I, K, L, M, N, P, Q, S, T, V, W or Y, or
[0270] Xₐ is C, D, E, H, I, K, M, N, P, Q, S, T, V, W or Y, and X_{b} is R, or
[0271] Xₐ is R, and X_{b} is R.

[0272] According to another particular embodiment, the invention relates to a pharmaceutical composition as defined above, wherein said isolated mutated human or simian lentiviral ENV protein or said fragment of said isolated mutated human or simian lentiviral ENV protein comprises one of the following amino acid sequences:

| | |
|---|---|
| A-I-E-K-Xₐ-X_{b}-X-DQ, | (SEQ ID NO: 422) |
| A-I-E-R-Xₐ-X_{b}-X-DQ, | (SEQ ID NO: 423) |
| A-V-E-K-Xₐ-X_{b}-X-DQ, | (SEQ ID NO: 424) |
| A-V-E-R-Xₐ-X_{b}-X-DQ. | (SEQ ID NO: 425) |

[0273] In one advantageous embodiment, the invention relates to a pharmaceutical composition as defined above, wherein the resulting immunosuppressive domain, contained in the mutated lentiviral protein, comprises the amino acid sequence of the list consisting of: SEQ ID NO:9 to SEQ ID NO:37.

[0274] In the invention “SEQ ID NO: 9 to SEQ ID NO:37” encompass SEQ ID NO: 9, SEQ ID NO: 10, SEQ ID NO: 11, SEQ ID NO: 12, SEQ ID NO: 13, SEQ ID NO: 14, SEQ ID NO: 15, SEQ ID NO: 16, SEQ ID NO: 17, SEQ ID NO: 18, SEQ ID NO: 19, SEQ ID NO: 20, SEQ ID NO: 21, SEQ ID NO: 22, SEQ ID NO: 23, SEQ ID NO: 24, SEQ ID NO: 25, SEQ ID NO: 26, SEQ ID NO: 27, SEQ ID NO: 28, SEQ ID NO: 29, SEQ ID NO: 30, SEQ ID NO: 31, SEQ ID NO: 32, SEQ ID NO: 33, SEQ ID NO: 34, SEQ ID NO: 35, SEQ ID NO: 36 and SEQ ID NO: 37.

[0275] The correspondence is the following one:

| | |
|---|---|
| AVERALKD | SEQ ID NO: 9 |
| AVERFLKD | SEQ ID NO: 10 |
| AVERGLKD | SEQ ID NO: 11 |
| AVERLLKD | SEQ ID NO: 12 |
| AVERRLKD | SEQ ID NO: 13 |
| AVERYAKD | SEQ ID NO: 14 |
| AVERYFKD | SEQ ID NO: 15 |
| AVERYGKD | SEQ ID NO: 16 |
| AVERYRKD | SEQ ID NO: 17 |
| AVERAAKD | SEQ ID NO: 18 |
| AVERAFKD | SEQ ID NO: 19 |
| AVERAGKD | SEQ ID NO: 20 |
| AVERARKD | SEQ ID NO: 21 |
| AVERFAKD | SEQ ID NO: 22 |
| AVERFFKD | SEQ ID NO: 23 |
| AVERFGKD | SEQ ID NO: 24 |
| AVERFRKD | SEQ ID NO: 25 |
| AVERGAKD | SEQ ID NO: 26 |
| AVERGFKD | SEQ ID NO: 27 |
| AVERGGKD | SEQ ID NO: 28 |
| AVERGRKD | SEQ ID NO: 29 |
| AVERLAKD | SEQ ID NO: 30 |
| AVERLFKD | SEQ ID NO: 31 |
| AVERLGKD | SEQ ID NO: 32 |
| AVERLRKD | SEQ ID NO: 33 |
| AVERRAKD | SEQ ID NO: 34 |
| AVERRFKD | SEQ ID NO: 35 |
| AVERRGKD | SEQ ID NO: 36 |
| AVERRRKD | SEQ ID NO: 37 |

[0276] In one advantageous embodiment, the invention relates to a pharmaceutical composition as defined above, wherein the resulting immunosuppressive domain, contained in the mutated lentiviral protein, comprises the amino acid sequence of the list consisting of: SEQ ID NO:38 to SEQ ID NO:66.

[0277] In the invention “SEQ ID NO: 38 to SEQ ID NO:66” encompass SEQ ID NO: 38, SEQ ID NO: 39, SEQ ID NO: 40, SEQ ID NO: 41, SEQ ID NO: 42, SEQ ID NO: 43, SEQ ID NO: 44, SEQ ID NO: 45, SEQ ID NO: 46, SEQ ID NO: 47, SEQ ID NO: 48, SEQ ID NO: 49, SEQ ID NO: 50, SEQ ID NO: 51, SEQ ID NO: 52, SEQ ID NO: 53, SEQ ID NO: 54, SEQ ID NO: 55, SEQ ID NO: 56, SEQ ID NO: 57, SEQ ID NO: 58, SEQ ID NO: 59, SEQ ID NO: 60, SEQ ID NO: 61, SEQ ID NO: 62, SEQ ID NO: 63, SEQ ID NO: 64, SEQ ID NO: 65 and SEQ ID NO: 66.

[0278] The correspondence is the following one:

| | |
|---|---|
| AIEKALKD | SEQ ID NO: 38 |
| AIEKFLKD | SEQ ID NO: 39 |
| AIEKGLKD | SEQ ID NO: 40 |
| AIEKLLKD | SEQ ID NO: 41 |
| AIEKRLKD | SEQ ID NO: 42 |
| AIEKYAKD | SEQ ID NO: 43 |
| AIEKYFKD | SEQ ID NO: 44 |
| AIEKYGKD | SEQ ID NO: 45 |
| AIEKYRKD | SEQ ID NO: 46 |
| AIEKAAKD | SEQ ID NO: 47 |
| AIEKAFKD | SEQ ID NO: 48 |
| AIEKAGKD | SEQ ID NO: 49 |
| AIEKARKD | SEQ ID NO: 50 |
| AIEKFAKD | SEQ ID NO: 51 |
| AIEKFFKD | SEQ ID NO: 52 |
| AIEKFGKD | SEQ ID NO: 53 |
| AIEKFRKD | SEQ ID NO: 54 |
| AIEKGAKD | SEQ ID NO: 55 |
| AIEKGFKD | SEQ ID NO: 56 |
| AIEKGGKD | SEQ ID NO: 57 |
| AIEKGRKD | SEQ ID NO: 58 |
| AIEKLAKD | SEQ ID NO: 59 |
| AIEKLFKD | SEQ ID NO: 60 |
| AIEKLGKD | SEQ ID NO: 61 |
| AIEKLRKD | SEQ ID NO: 62 |
| AIEKRAKD | SEQ ID NO: 63 |
| AIEKRFKD | SEQ ID NO: 64 |
| AIEKRGKD | SEQ ID NO: 65 |
| AIEKRRKD | SEQ ID NO: 66 |

[0279] In one advantageous embodiment, the invention relates to a pharmaceutical composition as defined above, wherein the resulting immunosuppressive domain, contained in the mutated lentiviral protein, comprises the amino acid sequence of the list consisting of: SEQ ID NO: 67 to SEQ ID NO: 95.

[0280] In the invention “SEQ ID NO: 67 to SEQ ID NO:95” encompass SEQ ID NO: 67, SEQ ID NO: 68, SEQ ID NO: 69, SEQ ID NO: 70, SEQ ID NO: 71, SEQ ID NO: 72, SEQ ID NO: 73, SEQ ID NO: 74, SEQ ID NO: 75, SEQ ID NO: 76, SEQ ID NO: 77, SEQ ID NO: 78, SEQ ID NO: 79, SEQ ID NO: 80, SEQ ID NO: 81, SEQ ID NO: 82, SEQ ID NO: 83, SEQ ID NO: 84, SEQ ID NO: 85, SEQ ID NO: 86, SEQ ID NO: 87, SEQ ID NO: 88, SEQ ID NO: 89, SEQ ID NO: 90, SEQ ID NO: 91, SEQ ID NO: 92, SEQ ID NO: 93, SEQ ID NO: 94 and SEQ ID NO: 95.

[0281] The correspondence is the following one:

| | |
|---|---|
| AIERALKD | SEQ ID NO: 67 |
| AIERFLKD | SEQ ID NO: 68 |
| AIERGLKD | SEQ ID NO: 69 |
| AIERLLKD | SEQ ID NO: 70 |
| AIERRLKD | SEQ ID NO: 71 |
| AIERYAKD | SEQ ID NO: 72 |
| AIERYFKD | SEQ ID NO: 73 |
| AIERYGKD | SEQ ID NO: 74 |
| AIERYRKD | SEQ ID NO: 75 |
| AIERAAKD | SEQ ID NO: 76 |
| AIERAFKD | SEQ ID NO: 77 |
| AIERAGKD | SEQ ID NO: 78 |
| AIERARKD | SEQ ID NO: 79 |
| AIERFAKD | SEQ ID NO: 80 |
| AIERFFKD | SEQ ID NO: 81 |
| AIERFGKD | SEQ ID NO: 82 |
| AIERFRKD | SEQ ID NO: 83 |
| AIERGAKD | SEQ ID NO: 84 |
| AIERGFKD | SEQ ID NO: 85 |
| AIERGGKD | SEQ ID NO: 86 |
| AIERGRKD | SEQ ID NO: 87 |
| AIERLAKD | SEQ ID NO: 88 |
| AIERLFKD | SEQ ID NO: 89 |
| AIERLGKD | SEQ ID NO: 90 |
| AIERLRKD | SEQ ID NO: 91 |
| AIERRAKD | SEQ ID NO: 92 |
| AIERRFKD | SEQ ID NO: 93 |
| AIERRGKD | SEQ ID NO: 94 |
| AIERRRKD | SEQ ID NO: 95 |

[0282] As mentioned above, the previous ENV proteins having their ISU comprising the above sequence are devoid of immunosuppressive properties.

[0283] Thus, in other words, any ENV protein of human or simian lentivirus having in their ISU an amino acid sequence comprising of the sequences SEQ ID NO: 9 to 95, is devoid of immunosuppressive properties.

[0284] In other words, a simian or human lentiviral ENV protein comprising, within its ISU domain, an amino acid sequence selected from SEQ ID NO: 9 to 95 is devoid of immunosuppressive properties.

[0285] In particular, the invention relates to a pharmaceutical composition as defined above, wherein said isolated mutated human or simian lentiviral ENV protein or said fragment of said isolated mutated human or simian lentiviral ENV protein comprises one of the amino acid sequences:
[0286] SEQ ID NO: 13, SEQ ID NO: 42, SEQ ID NO: 71,
[0287] SEQ ID NO: 9 to 12,
[0288] SEQ ID NO: 14 to 41,
[0289] SEQ ID NO: 43 to 70, and
[0290] SEQ ID NO: 72 to 95.

[0291] In particular, the invention relates to a pharmaceutical composition as defined above, wherein said isolated mutated human or simian lentiviral ENV protein or said fragment of said isolated mutated human or simian lentiviral ENV protein comprises one of the amino acid sequences:
[0292] SEQ ID NO: 13, SEQ ID NO: 42, SEQ ID NO: 71,
[0293] SEQ ID NO: 9, 11, 15 to 21, 23 to 29, 31 to 38, 40, 44 to 50, 52 to 58, 60 to 67, 69, 73 to 79, 81 to 87, 89 to 95.

[0294] In the invention, the fragments of the mutated ENV proteins according to the invention comprise or consist of the following sequences: SEQ ID NO: 67 to 211.

[0295] These fragments are also devoid of immunosuppressive properties.

[0296] However, these fragments retain the structure and the antigenicity of the corresponding immunosuppressive domain that is not mutated, i.e. the wild type immunosuppressive domain.

[0297] In the invention, the fragments of the mutated ENV proteins according to the invention comprise or consist of the following sequences: SEQ ID NO: 96 to 211.

[0298] The correspondences are as follows

| | |
|---|---|
| SGIVQQQSNLLRAIQARQHMLQLTVWGIKQLQARVLAVERAL | SEQ ID |
| KDQQLLG | NO: 96 |
| SGIVQQQSNLLRAIQARQHMLQLTVWGIKQLQARVLAVERFL | SEQ ID |
| KDQQLLG | NO: 97 |
| SGIVQQQSNLLRAIQARQHMLQLTVWGIKQLQARVLAVERGL | SEQ ID |
| KDQQLLG | NO: 98 |
| SGIVQQQSNLLRAIQARQHMLQLTVWGIKQLQARVLAVERLL | SEQ ID |
| KDQQLLG | NO: 99 |
| SGIVQQQSNLLRAIQARQHMLQLTVWGIKQLQARVLAVERRL | SEQ ID |
| KDQQLLG | NO: 100 |
| SGIVQQQSNLLRAIQARQHMLQLTVWGIKQLQARVLAVERYA | SEQ ID |
| KDQQLLG | NO: 101 |
| SGIVQQQSNLLRAIQARQHMLQLTVWGIKQLQARVLAVERYF | SEQ ID |
| KDQQLLG | NO: 102 |
| SGIVQQQSNLLRAIQARQHMLQLTVWGIKQLQARVLAVERYG | SEQ ID |
| KDQQLLG | NO: 103 |
| SGIVQQQSNLLRAIQARQHMLQLTVWGIKQLQARVLAVERYR | SEQ ID |
| KDQQLLG | NO: 104 |
| SGIVQQQSNLLRAIQARQHMLQLTVWGIKQLQARVLAVERAA | SEQ ID |
| KDQQLLG | NO: 105 |
| SGIVQQQSNLLRAIQARQHMLQLTVWGIKQLQARVLAVERAF | SEQ ID |
| KDQQLLG | NO: 106 |
| SGIVQQQSNLLRAIQARQHMLQLTVWGIKQLQARVLAVERAG | SEQ ID |
| KDQQLLG | NO: 107 |
| SGIVQQQSNLLRAIQARQHMLQLTVWGIKQLQARVLAVERAR | SEQ ID |
| KDQQLLG | NO: 108 |
| SGIVQQQSNLLRAIQARQHMLQLTVWGIKQLQARVLAVERFA | SEQ ID |
| KDQQLLG | NO: 109 |
| SGIVQQQSNLLRAIQARQHMLQLTVWGIKQLQARVLAVERFF | SEQ ID |
| KDQQLLG | NO: 110 |
| SGIVQQQSNLLRAIQARQHMLQLTVWGIKQLQARVLAVERFG | SEQ ID |
| KDQQLLG | NO: 111 |
| SGIVQQQSNLLRAIQARQHMLQLTVWGIKQLQARVLAVERFR | SEQ ID |
| KDQQLLG | NO: 112 |
| SGIVQQQSNLLRAIQARQHMLQLTVWGIKQLQARVLAVERGA | SEQ ID |
| KDQQLLG | NO: 113 |
| SGIVQQQSNLLRAIQARQHMLQLTVWGIKQLQARVLAVERGF | SEQ ID |
| KDQQLLG | NO: 114 |
| SGIVQQQSNLLRAIQARQHMLQLTVWGIKQLQARVLAVERGG | SEQ ID |
| KDQQLLG | NO: 115 |
| SGIVQQQSNLLRAIQARQHMLQLTVWGIKQLQARVLAVERGR | SEQ ID |
| KDQQLLG | NO: 116 |
| SGIVQQQSNLLRAIQARQHMLQLTVWGIKQLQARVLAVERLA | SEQ ID |
| KDQQLLG | NO: 117 |
| SGIVQQQSNLLRAIQARQHMLQLTVWGIKQLQARVLAVERLF | SEQ ID |
| KDQQLLG | NO: 118 |
| SGIVQQQSNLLRAIQARQHMLQLTVWGIKQLQARVLAVERLG | SEQ ID |
| KDQQLLG | NO: 119 |
| SGIVQQQSNLLRAIQARQHMLQLTVWGIKQLQARVLAVERLR | SEQ ID |
| KDQQLLG | NO: 120 |
| SGIVQQQSNLLRAIQARQHMLQLTVWGIKQLQARVLAVERRA | SEQ ID |
| KDQQLLG | NO: 121 |
| SGIVQQQSNLLRAIQARQHMLQLTVWGIKQLQARVLAVERRF | SEQ ID |
| KDQQLLG | NO: 122 |
| SGIVQQQSNLLRAIQARQHMLQLTVWGIKQLQARVLAVERRG | SEQ ID |
| KDQQLLG | NO: 123 |
| SGIVQQQSNLLRAIQARQHMLQLTVWGIKQLQARVLAVERRR | SEQ ID |
| KDQQLLG | NO: 124 |
| AGIVQQQQQLLDVVKRQQEMLRLTVWGTKNLQARVTAIEKA | SEQ ID |
| LKDQAQLNSWGCAFRQ | NO: 125 |
| AGIVQQQQQLLDVVKRQQEMLRLTVWGTKNLQARVTAIEKF | SEQ ID |
| LKDQAQLNSWGCAFRQ | NO: 126 |
| AGIVQQQQQLLDVVKRQQEMLRLTVWGTKNLQARVTAIEKG | SEQ ID |
| LKDQAQLNSWGCAFRQ | NO: 127 |
| AGIVQQQQQLLDVVKRQQEMLRLTVWGTKNLQARVTAIEKL | SEQ ID |
| LKDQAQLNSWGCAFRQ | NO: 128 |
| AGIVQQQQQLLDVVKRQQEMLRLTVWGTKNLQARVTAIEKR | SEQ ID |
| LKDQAQLNSWGCAFRQ | NO: 129 |
| AGIVQQQQQLLDVVKRQQEMLRLTVWGTKNLQARVTAIEKY | SEQ ID |
| AKDQAQLNSWGCAFRQ | NO: 130 |
| AGIVQQQQQLLDVVKRQQEMLRLTVWGTKNLQARVTAIEKY | SEQ ID |
| FKDQAQLNSWGCAFRQ | NO: 131 |
| AGIVQQQQQLLDVVKRQQEMLRLTVWGTKNLQARVTAIEKY | SEQ ID |
| GKDQAQLNSWGCAFRQ | NO: 132 |
| AGIVQQQQQLLDVVKRQQEMLRLTVWGTKNLQARVTAIEKY | SEQ ID |
| RKDQAQLNSWGCAFRQ | NO: 133 |
| AGIVQQQQQLLDVVKRQQEMLRLTVWGTKNLQARVTAIEKA | SEQ ID |
| AKDQAQLNSWGCAFRQ | NO: 134 |
| AGIVQQQQQLLDVVKRQQEMLRLTVWGTKNLQARVTAIEKA | SEQ ID |
| FKDQAQLNSWGCAFRQ | NO: 135 |
| AGIVQQQQQLLDVVKRQQEMLRLTVWGTKNLQARVTAIEKA | SEQ ID |
| GKDQAQLNSWGCAFRQ | NO: 136 |
| AGIVQQQQQLLDVVKRQQEMLRLTVWGTKNLQARVTAIEKA | SEQ ID |
| RKDQAQLNSWGCAFRQ | NO: 137 |
| AGIVQQQQQLLDVVKRQQEMLRLTVWGTKNLQARVTAIEKF | SEQ ID |
| AKDQAQLNSWGCAFRQ | NO: 138 |
| AGIVQQQQQLLDVVKRQQEMLRLTVWGTKNLQARVTAIEKF | SEQ ID |
| FKDQAQLNSWGCAFRQ | NO: 139 |
| AGIVQQQQQLLDVVKRQQEMLRLTVWGTKNLQARVTAIEKF | SEQ ID |
| GKDQAQLNSWGCAFRQ | NO: 140 |
| AGIVQQQQQLLDVVKRQQEMLRLTVWGTKNLQARVTAIEKF | SEQ ID |
| RKDQAQLNSWGCAFRQ | NO: 141 |
| AGIVQQQQQLLDVVKRQQEMLRLTVWGTKNLQARVTAIEKG | SEQ ID |
| AKDQAQLNSWGCAFRQ | NO: 142 |
| AGIVQQQQQLLDVVKRQQEMLRLTVWGTKNLQARVTAIEKG | SEQ ID |
| FKDQAQLNSWGCAFRQ | NO: 143 |
| AGIVQQQQQLLDVVKRQQEMLRLTVWGTKNLQARVTAIEKG | SEQ ID |
| GKDQAQLNSWGCAFRQ | NO: 144 |
| AGIVQQQQQLLDVVKRQQEMLRLTVWGTKNLQARVTAIEKG | SEQ ID |
| RKDQAQLNSWGCAFRQ | NO: 145 |
| AGIVQQQQQLLDVVKRQQEMLRLTVWGTKNLQARVTAIEKL | SEQ ID |
| AKDQAQLNSWGCAFRQ | NO: 146 |
| AGIVQQQQQLLDVVKRQQEMLRLTVWGTKNLQARVTAIEKL | SEQ ID |
| FKDQAQLNSWGCAFRQ | NO: 147 |
| AGIVQQQQQLLDVVKRQQEMLRLTVWGTKNLQARVTAIEKL | SEQ ID |
| GKDQAQLNSWGCAFRQ | NO: 148 |
| AGIVQQQQQLLDVVKRQQEMLRLTVWGTKNLQARVTAIEKL | SEQ ID |
| RKDQAQLNSWGCAFRQ | NO: 149 |
| AGIVQQQQQLLDVVKRQQEMLRLTVWGTKNLQARVTAIEKR | SEQ ID |
| AKDQAQLNSWGCAFRQ | NO: 150 |
| AGIVQQQQQLLDVVKRQQEMLRLTVWGTKNLQARVTAIEKR | SEQ ID |
| FKDQAQLNSWGCAFRQ | NO: 151 |
| AGIVQQQQQLLDVVKRQQEMLRLTVWGTKNLQARVTAIEKR | SEQ ID |
| GKDQAQLNSWGCAFRQ | NO: 152 |
| AGIVQQQQQLLDVVKRQQEMLRLTVWGTKNLQARVTAIEKR | SEQ ID |
| RKDQAQLNSWGCAFRQ | NO: 153 |
| AGIVQQQQQLLDVVKRQQELLRLTVWGTKNLQARVTAIEKA | SEQ ID |
| LQDQARLNSWGCAFRQ | NO: 154 |
| AGIVQQQQQLLDVVKRQQELLRLTVWGTKNLQARVTAIEKF | SEQ ID |
| LQDQARLNSWGCAFRQ | NO: 155 |
| AGIVQQQQQLLDVVKRQQELLRLTVWGTKNLQARVTAIEKG | SEQ ID |
| LQDQARLNSWGCAFRQ | NO: 156 |
| AGIVQQQQQLLDVVKRQQELLRLTVWGTKNLQARVTAIEKL | SEQ ID |
| LQDQARLNSWGCAFRQ | NO: 157 |
| AGIVQQQQQLLDVVKRQQELLRLTVWGTKNLQARVTAIEKR | SEQ ID |
| LQDQARLNSWGCAFRQ | NO: 158 |
| AGIVQQQQQLLDVVKRQQELLRLTVWGTKNLQARVTAIEKY | SEQ ID |
| AQDQARLNSWGCAFRQ | NO: 159 |
| AGIVQQQQQLLDVVKRQQELLRLTVWGTKNLQARVTAIEKY | SEQ ID |
| FQDQARLNSWGCAFRQ | NO: 160 |
| AGIVQQQQQLLDVVKRQQELLRLTVWGTKNLQARVTAIEKY | SEQ ID |
| GQDQARLNSWGCAFRQ | NO: 161 |
| AGIVQQQQQLLDVVKRQQELLRLTVWGTKNLQARVTAIEKY | SEQ ID |
| RQDQARLNSWGCAFRQ | NO: 162 |
| AGIVQQQQQLLDVVKRQQELLRLTVWGTKNLQARVTAIEKA | SEQ ID |
| AQDQARLNSWGCAFRQ | NO: 163 |
| AGIVQQQQQLLDVVKRQQELLRLTVWGTKNLQARVTAIEKA | SEQ ID |
| FQDQARLNSWGCAFRQ | NO: 164 |
| AGIVQQQQQLLDVVKRQQELLRLTVWGTKNLQARVTAIEKA | SEQ ID |
| GQDQARLNSWGCAFRQ | NO: 165 |
| AGIVQQQQQLLDVVKRQQELLRLTVWGTKNLQARVTAIEKA | SEQ ID |
| RQDQARLNSWGCAFRQ | NO: 166 |
| AGIVQQQQQLLDVVKRQQELLRLTVWGTKNLQARVTAIEKF | SEQ ID |
| AQDQARLNSWGCAFRQ | NO: 167 |
| AGIVQQQQQLLDVVKRQQELLRLTVWGTKNLQARVTAIEKF | SEQ ID |
| FQDQARLNSWGCAFRQ | NO: 168 |
| AGIVQQQQQLLDVVKRQQELLRLTVWGTKNLQARVTAIEKF | SEQ ID |
| GQDQARLNSWGCAFRQ | NO: 169 |
| AGIVQQQQQLLDVVKRQQELLRLTVWGTKNLQARVTAIEKF | SEQ ID |
| RQDQARLNSWGCAFRQ | NO: 170 |
| AGIVQQQQQLLDVVKRQQELLRLTVWGTKNLQARVTAIEKG | SEQ ID |
| AQDQARLNSWGCAFRQ | NO: 171 |
| AGIVQQQQQLLDVVKRQQELLRLTVWGTKNLQARVTAIEKG | SEQ ID |
| FQDQARLNSWGCAFRQ | NO: 172 |
| AGIVQQQQQLLDVVKRQQELLRLTVWGTKNLQARVTAIEKG | SEQ ID |
| GQDQARLNSWGCAFRQ | NO: 173 |
| AGIVQQQQQLLDVVKRQQELLRLTVWGTKNLQARVTAIEKG | SEQ ID |
| RQDQARLNSWGCAFRQ | NO: 174 |
| AGIVQQQQQLLDVVKRQQELLRLTVWGTKNLQARVTAIEKL | SEQ ID |
| AQDQARLNSWGCAFRQ | NO: 175 |
| AGIVQQQQQLLDVVKRQQELLRLTVWGTKNLQARVTAIEKL | SEQ ID |
| FQDQARLNSWGCAFRQ | NO: 176 |
| AGIVQQQQQLLDVVKRQQELLRLTVWGTKNLQARVTAIEKL | SEQ ID |
| GQDQARLNSWGCAFRQ | NO: 177 |
| AGIVQQQQQLLDVVKRQQELLRLTVWGTKNLQARVTAIEKL | SEQ ID |
| RQDQARLNSWGCAFRQ | NO: 178 |
| AGIVQQQQQLLDVVKRQQELLRLTVWGTKNLQARVTAIEKR | SEQ ID |
| AQDQARLNSWGCAFRQ | NO: 179 |
| AGIVQQQQQLLDVVKRQQELLRLTVWGTKNLQARVTAIEKR | SEQ ID |
| FQDQARLNSWGCAFRQ | NO: 180 |
| AGIVQQQQQLLDVVKRQQELLRLTVWGTKNLQARVTAIEKR | SEQ ID |
| GQDQARLNSWGCAFRQ | NO: 181 |
| AGIVQQQQQLLDVVKRQQELLRLTVWGTKNLQARVTAIEKR | SEQ ID |
| RQDQARLNSWGCAFRQ | NO: 182 |
| AGIVQQQQQLLDVVKRQQELLRLTVWGTKNLQTRVTAIEKA | SEQ ID |
| LKDQAQLNAWGCAFRQ | NO: 183 |
| AGIVQQQQQLLDVVKRQQELLRLTVWGTKNLQTRVTAIEKF | SEQ ID |
| LKDQAQLNAWGCAFRQ | NO: 184 |
| AGIVQQQQQLLDVVKRQQELLRLTVWGTKNLQTRVTAIEKG | SEQ ID |
| LKDQAQLNAWGCAFRQ | NO: 185 |
| AGIVQQQQQLLDVVKRQQELLRLTVWGTKNLQTRVTAIEKL | SEQ ID |
| LKDQAQLNAWGCAFRQ | NO: 186 |
| AGIVQQQQQLLDVVKRQQELLRLTVWGTKNLQTRVTAIEKR | SEQ ID |
| LKDQAQLNAWGCAFRQ | NO: 187 |
| AGIVQQQQQLLDVVKRQQELLRLTVWGTKNLQTRVTAIEKY | SEQ ID |
| AKDQAQLNAWGCAFRQ | NO: 188 |
| AGIVQQQQQLLDVVKRQQELLRLTVWGTKNLQTRVTAIEKY | SEQ ID |
| FKDQAQLNAWGCAFRQ | NO: 189 |
| AGIVQQQQQLLDVVKRQQELLRLTVWGTKNLQTRVTAIEKY | SEQ ID |
| GKDQAQLNAWGCAFRQ | NO: 190 |
| AGIVQQQQQLLDVVKRQQELLRLTVWGTKNLQTRVTAIEKY | SEQ ID |
| RKDQAQLNAWGCAFRQ | NO: 191 |
| AGIVQQQQQLLDVVKRQQELLRLTVWGTKNLQTRVTAIEKA | SEQ ID |
| AKDQAQLNAWGCAFRQ | NO: 192 |
| AGIVQQQQQLLDVVKRQQELLRLTVWGTKNLQTRVTAIEKA | SEQ ID |
| FKDQAQLNAWGCAFRQ | NO: 193 |
| AGIVQQQQQLLDVVKRQQELLRLTVWGTKNLQTRVTAIEKA | SEQ ID |
| GKDQAQLNAWGCAFRQ | NO: 194 |
| AGIVQQQQQLLDVVKRQQELLRLTVWGTKNLQTRVTAIEKA | SEQ ID |
| RKDQAQLNAWGCAFRQ | NO: 195 |
| AGIVQQQQQLLDVVKRQQELLRLTVWGTKNLQTRVTAIEKF | SEQ ID |
| AKDQAQLNAWGCAFRQ | NO: 196 |
| AGIVQQQQQLLDVVKRQQELLRLTVWGTKNLQTRVTAIEKF | SEQ ID |
| FKDQAQLNAWGCAFRQ | NO: 197 |
| AGIVQQQQQLLDVVKRQQELLRLTVWGTKNLQTRVTAIEKF | SEQ ID |
| GKDQAQLNAWGCAFRQ | NO: 198 |
| AGIVQQQQQLLDVVKRQQELLRLTVWGTKNLQTRVTAIEKF | SEQ ID |
| RKDQAQLNAWGCAFRQ | NO: 199 |
| AGIVQQQQQLLDVVKRQQELLRLTVWGTKNLQTRVTAIEKG | SEQ ID |
| AKDQAQLNAWGCAFRQ | NO: 200 |
| AGIVQQQQQLLDVVKRQQELLRLTVWGTKNLQTRVTAIEKG | SEQ ID |
| FKDQAQLNAWGCAFRQ | NO: 201 |
| AGIVQQQQQLLDVVKRQQELLRLTVWGTKNLQTRVTAIEKG | SEQ ID |
| GKDQAQLNAWGCAFRQ | NO: 202 |
| AGIVQQQQQLLDVVKRQQELLRLTVWGTKNLQTRVTAIEKG | SEQ ID |
| RKDQAQLNAWGCAFRQ | NO: 203 |
| AGIVQQQQQLLDVVKRQQELLRLTVWGTKNLQTRVTAIEKL | SEQ ID |
| AKDQAQLNAWGCAFRQ | NO: 204 |
| AGIVQQQQQLLDVVKRQQELLRLTVWGTKNLQTRVTAIEKL | SEQ ID |
| FKDQAQLNAWGCAFRQ | NO: 205 |
| AGIVQQQQQLLDVVKRQQELLRLTVWGTKNLQTRVTAIEKL | SEQ ID |
| GKDQAQLNAWGCAFRQ | NO: 206 |
| AGIVQQQQQLLDVVKRQQELLRLTVWGTKNLQTRVTAIEKL | SEQ ID |
| RKDQAQLNAWGCAFRQ | NO: 207 |
| AGIVQQQQQLLDVVKRQQELLRLTVWGTKNLQTRVTAIEKR | SEQ ID |
| AKDQAQLNAWGCAFRQ | NO: 208 |
| AGIVQQQQQLLDVVKRQQELLRLTVWGTKNLQTRVTAIEKR | SEQ ID |
| FKDQAQLNAWGCAFRQ | NO: 209 |
| AGIVQQQQQLLDVVKRQQELLRLTVWGTKNLQTRVTAIEKR | SEQ ID |
| GKDQAQLNAWGCAFRQ | NO: 210 |
| AGIVQQQQQLLDVVKRQQELLRLTVWGTKNLQTRVTAIEKR | SEQ ID |
| RKDQAQLNAWGCAFRQ | NO: 211 |

[0299] In particular, the invention relates to a pharmaceutical composition as defined above, wherein said isolated mutated human or simian lentiviral ENV protein or said fragment of said isolated mutated human or simian lentiviral ENV protein comprises one of the amino acid sequences: SEQ ID NO: 96, 98, 100, 102 to 108, 110 to 116, 118 to 125, 127, 129, 131 to 137, 139 to 145, 147 to 154, 156, 158, 160 to 166, 168 to 174, 176 to 183, 185, 187, 189 to 195, 197 to 203, 205 to 211.

[0300] Advantageously, the invention relates to the pharmaceutical composition as defined above, wherein said mutated protein consists of one of the following sequences SEQ ID NO: 212 to 269

HIV-1 LAI

| | |
|---|---|
| MRVKEKYQHLWRWGWKWGTMLLGILMICSATEKLWVTVY | SEQ ID |
| YGVPVWKEATTTLFCASDAKAYDTEVHNVWATHACVPTDP | NO: |
| NPQEVVLVNVTENFNMWKNDMVEQMHEDIISLWDQSLKPC | 212 |
| VKLTPLCVSLKCTDLGNATNTNSSNTNSSSGEMMMEKGEIK | |
| NCSFNISTSIRGKVQKEYAFFYKLDIIPIDNDTTSYTLTSCNTS | |
| VITQACPKVSFEPIPIHYCAPAGFAILKCNNKTFNGTGPCTNVS | |
| TVQCTHGIRPVVSTQLLLNGSLAEEEVVIRSANFTDNAKTIIV | |
| QLNQSVEINCTRPNNNTRKSIRIQRGPGRAFVTIGKIGNMRQA | |
| HCNISRAKWNATLKQIASKLREQFGNNKTIIFKQSSGGDPEIV | |
| THSFNCGGEFFYCNSTQLFNSTWFNSTWSTEGSNNTEGSDTIT | |
| LPCRIKQFINMWQEVGKAMYAPPISGQIRCSSNITGLLLTRDG | |
| GNNNNGSEIFRPGGGDMRDNWRSELYKYKVVKIEPLGVAPT | |
| KAKRRVVQREKRAVGIGALFLGFLGAAGSTMGARSMTLTV | |
| QARQLLSGIVQQQNNLLRAIEAQQHLLQLTVWGIKQLQARIL | |
| AVERALKDQQLLGIWGCSGKLICTTAVPWNASWSNKSLEQI | |
| WNNMTWMEWDREINNYTSLIHSLIEESQNQQEKNEQELLEL | |
| DKWASLWNWFNITNWLWYIKIFIMIVGGLVGLRIVFAVLSIV | |
| NRVRQGYSPLSFQTHLPTPRGPDRPEGIEEEGGERDRDRSIRL | |
| VNGSLALIWDDLRSLCLFSYHRLRDLLLIVTRIVELLGRRGW | |
| EALKYWWNLLQYWSQELKNSAVSLLNATAIAVAEGTDRVIE | |
| VVQGACRAIRHIPRRIRQGLERILL | |
| MRVKEKYQHLWRWGWKWGTMLLGILMICSATEKLWVTVY | SEQ ID |
| YGVPVWKEATTTLFCASDAKAYDTEVHNVWATHACVPTDP | NO: |
| NPQEVVLVNVTENFNMWKNDMVEQMHEDIISLWDQSLKPC | 213 |
| VKLTPLCVSLKCTDLGNATNTNSSNTNSSSGEMMMEKGEIK | |
| NCSFNISTSIRGKVQKEYAFFYKLDIIPIDNDTTSYTLTSCNTS | |
| VITQACPKVSFEPIPIHYCAPAGFAILKCNNKTFNGTGPCTNVS | |
| TVQCTHGIRPVVSTQLLLNGSLAEEEVVIRSANFTDNAKTIIV | |
| QLNQSVEINCTRPNNNTRKSIRIQRGPGRAFVTIGKIGNMRQA | |
| HCNISRAKWNATLKQIASKLREQFGNNKTIIFKQS SGGDPEIV | |
| THSFNCGGEFFYCNSTQLFNSTWFNSTWSTEGSNNTEGSDTIT | |
| LPCRIKQFINMWQEVGKAMYAPPISGQIRCSSNITGLLLTRDG | |
| GNNNNGSEIFRPGGGDMRDNWRSELYKYKVVKIEPLGVAPT | |
| KAKRRVVQREKRAVGIGALFLGFLGAAGSTMGARSMTLTV | |
| QARQLLSGIVQQQNNLLRAIEAQQHLLQLTVWGIKQLQARIL | |
| AVERFLKDQQLLGIWGCSGKLICTTAVPWNASWSNKSLEQI | |
| WNNMTWMEWDREINNYTSLIHSLIEESQNQQEKNEQELLEL | |
| DKWASLWNWFNITNWLWYIKIFIMIVGGLVGLRIVFAVLSIV | |
| NRVRQGYSPLSFQTHLPTPRGPDRPEGIEEEGGERDRDRSIRL | |
| VNGSLALIWDDLRSLCLFSYHRLRDLLLIVTRIVELLGRRGW | |
| EALKYWWNLLQYWSQELKNSAVSLLNATAIAVAEGTDRVIE | |
| VVQGACRAIRHIPRRIRQGLERILL | |
| MRVKEKYQHLWRWGWKWGTMLLGILMICSATEKLWVTVY | SEQ ID |
| YGVPVWKEATTTLFCASDAKAYDTEVHNVWATHACVPTDP | NO: |
| NPQEVVLVNVTENFNMWKNDMVEQMHEDIISLWDQSLKPC | 214 |
| VKLTPLCVSLKCTDLGNATNTNSSNTNSSSGEMMMEKGEIK | |
| NCSFNISTSIRGKVQKEYAFFYKLDIIPIDNDTTSYTLTSCNTS | |
| VITQACPKVSFEPIPIHYCAPAGFAILKCNNKTFNGTGPCTNVS | |
| TVQCTHGIRPVVSTQLLLNGSLAEEEVVIRSANFTDNAKTIIV | |
| QLNQSVEINCTRPNNNTRKSIRIQRGPGRAFVTIGKIGNMRQA | |
| HCNISRAKWNATLKQIASKLREQFGNNKTIIFKQSSGGDPEIV | |
| THSFNCGGEFFYCNSTQLFNSTWFNSTWSTEGSNNTEGSDTIT | |
| LPCRIKQFINMWQEVGKAMYAPPISGQIRCSSNITGLLLTRDG | |
| GNNNNGSEIFRPGGGDMRDNWRSELYKYKVVKIEPLGVAPT | |
| KAKRRVVQREKRAVGIGALFLGFLGAAGSTMGARSMTLTV | |
| QARQLLSGIVQQQNNLLRAIEAQQHLLQLTVWGIKQLQARIL | |
| AVERGLKDQQLLGIWGCSGKLICTTAVPWNASWSNKSLEQI | |
| WNNMTWMEWDREINNYTSLIHSLIEESQNQQEKNEQELLEL | |
| DKWASLWNWFNITNWLWYIKIFIMIVGGLVGLRIVFAVLSIV | |
| NRVRQGYSPLSFQTHLPTPRGPDRPEGIEEEGGERDRDRSIRL | |
| VNGSLALIWDDLRSLCLFSYHRLRDLLLIVTRIVELLGRRGW | |
| EALKYWWNLLQYWSQELKNSAVSLLNATAIAVAEGTDRVIE | |
| VVQGACRAIRHIPRRIRQGLERILL | |
| MRVKEKYQHLWRWGWKWGTMLLGILMICSATEKLWVTVY | SEQ ID |
| YGVPVWKEATTTLFCASDAKAYDTEVHNVWATHACVPTDP | NO: |
| NPQEVVLVNVTENFNMWKNDMVEQMHEDIISLWDQSLKPC | 215 |
| VKLTPLCVSLKCTDLGNATNTNSSNTNSSSGEMMMEKGEIK | |
| NCSFNISTSIRGKVQKEYAFFYKLDIIPIDNDTTSYTLTSCNTS | |
| VITQACPKVSFEPIPIHYCAPAGFAILKCNNKTFNGTGPCTNVS | |
| TVQCTHGIRPVVSTQLLLNGSLAEEEVVIRSANFTDNAKTIIV | |
| QLNQSVEINCTRPNNNTRKSIRIQRGPGRAFVTIGKIGNMRQA | |
| HCNISRAKWNATLKQIASKLREQFGNNKTIIFKQSSGGDPEIV | |
| THSFNCGGEFFYCNSTQLFNSTWFNSTWSTEGSNNTEGSDTIT | |
| LPCRIKQFINMWQEVGKAMYAPPISGQIRCSSNITGLLLTRDG | |
| GNNNNGSEIFRPGGGDMRDNWRSELYKYKVVKIEPLGVAPT | |
| KAKRRVVQREKRAVGIGALFLGFLGAAGSTMGARSMTLTV | |
| QARQLLSGIVQQQNNLLRAIEAQQHLLQLTVWGIKQLQARIL | |
| AVERLLKDQQLLGIWGCSGKLICTTAVPWNASWSNKSLEQI | |
| WNNMTWMEWDREINNYTSLIHSLIEESQNQQEKNEQELLEL | |
| DKWASLWNWFNITNWLWYIKIFIMIVGGLVGLRIVFAVLSIV | |
| NRVRQGYSPLSFQTHLPTPRGPDRPEGIEEEGGERDRDRSIRL | |
| VNGSLALIWDDLRSLCLFSYHRLRDLLLIVTRIVELLGRRGW | |
| EALKYWWNLLQYWSQELKNSAVSLLNATAIAVAEGTDRVIE | |
| VVQGACRAIRHIPRRIRQGLERILL | |
| MRVKEKYQHLWRWGWKWGTMLLGILMICSATEKLWVTVY | SEQ ID |
| YGVPVWKEATTTLFCASDAKAYDTEVHNVWATHACVPTDP | NO: |
| NPQEVVLVNVTENFNMWKNDMVEQMHEDIISLWDQSLKPC | 216 |
| VKLTPLCVSLKCTDLGNATNTNSSNTNSSSGEMMMEKGEIK | |
| NCSFNISTSIRGKVQKEYAFFYKLDIIPIDNDTTSYTLTSCNTS | |
| VITQACPKVSFEPIPIHYCAPAGFAILKCNNKTFNGTGPCTNVS | |
| TVQCTHGIRPVVSTQLLLNGSLAEEEVVIRSANFTDNAKTIIV | |
| QLNQSVEINCTRPNNNTRKSIRIQRGPGRAFVTIGKIGNMRQA | |
| HCNISRAKWNATLKQIASKLREQFGNNKTIIFKQSSGGDPEIV | |
| THSFNCGGEFFYCNSTQLFNSTWFNSTWSTEGSNNTEGSDTIT | |
| LPCRIKQFINMWQEVGKAMYAPPISGQIRCSSNITGLLLTRDG | |
| GNNNNGSEIFRPGGGDMRDNWRSELYKYKVVKIEPLGVAPT | |
| KAKRRVVQREKRAVGIGALFLGFLGAAGSTMGARSMTLTV | |
| QARQLLSGIVQQQNNLLRAIEAQQHLLQLTVWGIKQLQARIL | |
| AVERRLKDQQLLGIWGCSGKLICTTAVPWNASWSNKSLEQI | |
| WNNMTWMEWDREINNYTSLIHSLIEESQNQQEKNEQELLEL | |
| DKWASLWNWFNITNWLWYIKIFIMIVGGLVGLRIVFAVLSIV | |
| NRVRQGYSPLSFQTHLPTPRGPDRPEGIEEEGGERDRDRSIRL | |
| VNGSLALIWDDLRSLCLFSYHRLRDLLLIVTRIVELLGRRGW | |
| EALKYWWNLLQYWSQELKNSAVSLLNATAIAVAEGTDRVIE | |
| VVQGACRAIRHIPRRIRQGLERILL | |
| MRVKEKYQHLWRWGWKWGTMLLGILMICSATEKLWVTVY | SEQ |
| YGVPVWKEATTTLFCASDAKAYDTEVHNVWATHACVPTDP | ID NO: |
| NPQEVVLVNVTENFNMWKNDMVEQMHEDIISLWDQSLKPC | 217 |
| VKLTPLCVSLKCTDLGNATNTNSSNTNSSSGEMMMEKGEIK | |
| NCSFNISTSIRGKVQKEYAFFYKLDIIPIDNDTTSYTLTSCNTS | |
| VITQACPKVSFEPIPIHYCAPAGFAILKCNNKTFNGTGPCTNVS | |
| TVQCTHGIRPVVSTQLLLNGSLAEEEVVIRSANFTDNAKTIIV | |
| QLNQSVEINCTRPNNNTRKSIRIQRGPGRAFVTIGKIGNMRQA | |
| HCNISRAKWNATLKQIASKLREQFGNNKTIIFKQSSGGDPEIV | |
| THSFNCGGEFFYCNSTQLFNSTWFNSTWSTEGSNNTEGSDTIT | |
| LPCRIKQFINMWQEVGKAMYAPPISGQIRCSSNITGLLLTRDG | |
| GNNNNGSEIFRPGGGDMRDNWRSELYKYKVVKIEPLGVAPT | |
| KAKRRVVQREKRAVGIGALFLGFLGAAGSTMGARSMTLTV | |
| QARQLLSGIVQQQNNLLRAIEAQQHLLQLTVWGIKQLQARIL | |
| AVERYAKDQQLLGIWGCSGKLICTTAVPWNASWSNKSLEQI | |
| WNNMTWMEWDREINNYTSLIHSLIEESQNQQEKNEQELLEL | |
| DKWASLWNWFNITNWLWYIKIFIMIVGGLVGLRIVFAVLSIV | |
| NRVRQGYSPLSFQTHLPTPRGPDRPEGIEEEGGERDRDRSIRL | |
| VNGSLALIWDDLRSLCLFSYHRLRDLLLIVTRIVELLGRRGW | |
| EALKYWWNLLQYWSQELKNSAVSLLNATAIAVAEGTDRVIE | |
| VVQGACRAIRHIPRRIRQGLERILL | |
| MRVKEKYQHLWRWGWKWGTMLLGILMICSATEKLWVTVY | SEQ |
| YGVPVWKEATTTLFCASDAKAYDTEVHNVWATHACVPTDP | ID NO: |
| NPQEVVLVNVTENFNMWKNDMVEQMHEDIISLWDQSLKPC | 218 |
| VKLTPLCVSLKCTDLGNATNTNSSNTNSSSGEMMMEKGEIK | |
| NCSFNISTSIRGKVQKEYAFFYKLDIIPIDNDTTSYTLTSCNTS | |
| VITQACPKVSFEPIPIHYCAPAGFAILKCNNKTFNGTGPCTNVS | |
| TVQCTHGIRPVVSTQLLLNGSLAEEEVVIRSANFTDNAKTIIV | |
| QLNQSVEINCTRPNNNTRKSIRIQRGPGRAFVTIGKIGNMRQA | |
| HCNISRAKWNATLKQIASKLREQFGNNKTIIFKQSSGGDPEIV | |
| THSFNCGGEFFYCNSTQLFNSTWFNSTWSTEGSNNTEGSDTIT | |
| LPCRIKQFINMWQEVGKAMYAPPISGQIRCSSNITGLLLTRDG | |
| GNNNNGSEIFRPGGGDMRDNWRSELYKYKVVKIEPLGVAPT | |
| KAKRRVVQREKRAVGIGALFLGFLGAAGSTMGARSMTLTV | |
| QARQLLSGIVQQQNNLLRAIEAQQHLLQLTVWGIKQLQARIL | |
| AVERYFKDQQLLGIWGCSGKLICTTAVPWNASWSNKSLEQI | |
| WNNMTWMEWDREINNYTSLIHSLIEESQNQQEKNEQELLEL | |
| DKWASLWNWFNITNWLWYIKIFIMIVGGLVGLRIVFAVLSIV | |
| NRVRQGYSPLSFQTHLPTPRGPDRPEGIEEEGGERDRDRSIRL | |
| VNGSLALIWDDLRSLCLFSYHRLRDLLLIVTRIVELLGRRGW | |
| EALKYWWNLLQYWSQELKNSAVSLLNATAIAVAEGTDRVIE | |
| VVQGACRAIRHIPRRIRQGLERILL | |
| MRVKEKYQHLWRWGWKWGTMLLGILMICSATEKLWVTVY | SEQ |
| YGVPVWKEATTTLFCASDAKAYDTEVHNVWATHACVPTDP | ID NO: |
| NPQEVVLVNVTENFNMWKNDMVEQMHEDIISLWDQSLKPC | 219 |
| VKLTPLCVSLKCTDLGNATNTNSSNTNSSSGEMMMEKGEIK | |
| NCSFNISTSIRGKVQKEYAFFYKLDIIPIDNDTTSYTLTSCNTS | |
| VITQACPKVSFEPIPIHYCAPAGFAILKCNNKTFNGTGPCTNVS | |
| TVQCTHGIRPVVSTQLLLNGSLAEEEVVIRSANFTDNAKTIIV | |
| QLNQSVEINCTRPNNNTRKSIRIQRGPGRAFVTIGKIGNMRQA | |
| HCNISRAKWNATLKQIASKLREQFGNNKTIIFKQSSGGDPEIV | |
| THSFNCGGEFFYCNSTQLFNSTWFNSTWSTEGSNNTEGSDTIT | |
| LPCRIKQFINMWQEVGKAMYAPPISGQIRCSSNITGLLLTRDG | |
| GNNNNGSEIFRPGGGDMRDNWRSELYKYKVVKIEPLGVAPT | |
| KAKRRVVQREKRAVGIGALFLGFLGAAGSTMGARSMTLTV | |
| QARQLLSGIVQQQNNLLRAIEAQQHLLQLTVWGIKQLQARIL | |
| AVERYGKDQQLLGIWGCSGKLICTTAVPWNASWSNKSLEQI | |
| WNNMTWMEWDREINNYTSLIHSLIEESQNQQEKNEQELLEL | |
| DKWASLWNWFNITNWLWYIKIFIMIVGGLVGLRIVFAVLSIV | |
| NRVRQGYSPLSFQTHLPTPRGPDRPEGIEEEGGERDRDRSIRL | |
| VNGSLALIWDDLRSLCLFSYHRLRDLLLIVTRIVELLGRRGW | |
| EALKYWWNLLQYWSQELKNSAVSLLNATAIAVAEGTDRVIE | |
| VVQGACRAIRHIPRRIRQGLERILL | |
| MRVKEKYQHLWRWGWKWGTMLLGILMICSATEKLWVTVY | SEQ |
| YGVPVWKEATTTLFCASDAKAYDTEVHNVWATHACVPTDP | ID NO: |
| NPQEVVLVNVTENFNMWKNDMVEQMHEDIISLWDQSLKPC | 220 |
| VKLTPLCVSLKCTDLGNATNTNSSNTNSSSGEMMMEKGEIK | |
| NCSFNISTSIRGKVQKEYAFFYKLDIIPIDNDTTSYTLTSCNTS | |
| VITQACPKVSFEPIPIHYCAPAGFAILKCNNKTFNGTGPCTNVS | |
| TVQCTHGIRPVVSTQLLLNGSLAEEEVVIRSANFTDNAKTIIV | |
| QLNQSVEINCTRPNNNTRKSIRIQRGPGRAFVTIGKIGNMRQA | |
| HCNISRAKWNATLKQIASKLREQFGNNKTIIFKQSSGGDPEIV | |
| THSFNCGGEFFYCNSTQLFNSTWFNSTWSTEGSNNTEGSDTIT | |
| LPCRIKQFINMWQEVGKAMYAPPISGQIRCSSNITGLLLTRDG | |
| GNNNNGSEIFRPGGGDMRDNWRSELYKYKVVKIEPLGVAPT | |
| KAKRRVVQREKRAVGIGALFLGFLGAAGSTMGARSMTLTV | |
| QARQLLSGIVQQQNNLLRAIEAQQHLLQLTVWGIKQLQARIL | |
| AVERYRKDQQLLGIWGCSGKLICTTAVPWNASWSNKSLEQI | |
| WNNMTWMEWDREINNYTSLIHSLIEESQNQQEKNEQELLEL | |
| DKWASLWNWFNITNWLWYIKIFIMIVGGLVGLRIVFAVLSIV | |
| NRVRQGYSPLSFQTHLPTPRGPDRPEGIEEEGGERDRDRSIRL | |
| VNGSLALIWDDLRSLCLFSYHRLRDLLLIVTRIVELLGRRGW | |
| EALKYWWNLLQYWSQELKNSAVSLLNATAIAVAEGTDRVIE | |
| VVQGACRAIRHIPRRIRQGLERILL | |
| MRVKEKYQHLWRWGWKWGTMLLGILMICSATEKLWVTVY | SEQ |
| YGVPVWKEATTTLFCASDAKAYDTEVHNVWATHACVPTDP | ID NO: |
| NPQEVVLVNVTENFNMWKNDMVEQMHEDIISLWDQSLKPC | 221 |
| VKLTPLCVSLKCTDLGNATNTNSSNTNSSSGEMMMEKGEIK | |
| NCSFNISTSIRGKVQKEYAFFYKLDIIPIDNDTTSYTLTSCNTS | |
| VITQACPKVSFEPIPIHYCAPAGFAILKCNNKTFNGTGPCTNVS | |
| TVQCTHGIRPVVSTQLLLNGSLAEEEVVIRSANFTDNAKTIIV | |
| QLNQSVEINCTRPNNNTRKSIRIQRGPGRAFVTIGKIGNMRQA | |
| HCNISRAKWNATLKQIASKLREQFGNNKTIIFKQSSGGDPEIV | |
| THSFNCGGEFFYCNSTQLFNSTWFNSTWSTEGSNNTEGSDTIT | |
| LPCRIKQFINMWQEVGKAMYAPPISGQIRCSSNITGLLLTRDG | |
| GNNNNGSEIFRPGGGDMRDNWRSELYKYKVVKIEPLGVAPT | |
| KAKRRVVQREKRAVGIGALFLGFLGAAGSTMGARSMTLTV | |
| QARQLLSGIVQQQNNLLRAIEAQQHLLQLTVWGIKQLQARIL | |
| AVERAAKDQQLLGIWGCSGKLICTTAVPWNASWSNKSLEQI | |
| WNNMTWMEWDREINNYTSLIHSLIEESQNQQEKNEQELLEL | |
| DKWASLWNWFNITNWLWYIKIFIMIVGGLVGLRIVFAVLSIV | |
| NRVRQGYSPLSFQTHLPTPRGPDRPEGIEEEGGERDRDRSIRL | |
| VNGSLALIWDDLRSLCLFSYHRLRDLLLIVTRIVELLGRRGW | |
| EALKYWWNLLQYWSQELKNSAVSLLNATAIAVAEGTDRVIE | |
| VVQGACRAIRHIPRRIRQGLERILL | |
| MRVKEKYQHLWRWGWKWGTMLLGILMICSATEKLWVTVY | SEQ |
| YGVPVWKEATTTLFCASDAKAYDTEVHNVWATHACVPTDP | ID NO: |
| NPQEVVLVNVTENFNMWKNDMVEQMHEDIISLWDQSLKPC | 222 |
| VKLTPLCVSLKCTDLGNATNTNSSNTNSSSGEMMMEKGEIK | |
| NCSFNISTSIRGKVQKEYAFFYKLDIIPIDNDTTSYTLTSCNTS | |
| VITQACPKVSFEPIPIHYCAPAGFAILKCNNKTFNGTGPCTNVS | |
| TVQCTHGIRPVVSTQLLLNGSLAEEEVVIRSANFTDNAKTIIV | |
| QLNQSVEINCTRPNNNTRKSIRIQRGPGRAFVTIGKIGNMRQA | |
| HCNISRAKWNATLKQIASKLREQFGNNKTIIFKQSSGGDPEIV | |
| THSFNCGGEFFYCNSTQLFNSTWFNSTWSTEGSNNTEGSDTIT | |
| LPCRIKQFINMWQEVGKAMYAPPISGQIRCSSNITGLLLTRDG | |
| GNNNNGSEIFRPGGGDMRDNWRSELYKYKVVKIEPLGVAPT | |
| KAKRRVVQREKRAVGIGALFLGFLGAAGSTMGARSMTLTV | |
| QARQLLSGIVQQQNNLLRAIEAQQHLLQLTVWGIKQLQARIL | |
| AVERAFKDQQLLGIWGCSGKLICTTAVPWNASWSNKSLEQI | |
| WNNMTWMEWDREINNYTSLIHSLIEESQNQQEKNEQELLEL | |
| DKWASLWNWFNITNWLWYIKIFIMIVGGLVGLRIVFAVLSIV | |
| NRVRQGYSPLSFQTHLPTPRGPDRPEGIEEEGGERDRDRSIRL | |
| VNGSLALIWDDLRSLCLFSYHRLRDLLLIVTRIVELLGRRGW | |
| EALKYWWNLLQYWSQELKNSAVSLLNATAIAVAEGTDRVIE | |
| VVQGACRAIRHIPRRIRQGLERILL | |
| MRVKEKYQHLWRWGWKWGTMLLGILMICSATEKLWVTVY | SEQ |
| YGVPVWKEATTTLFCASDAKAYDTEVHNVWATHACVPTDP | ID NO: |
| NPQEVVLVNVTENFNMWKNDMVEQMHEDIISLWDQSLKPC | 223 |
| VKLTPLCVSLKCTDLGNATNTNSSNTNSSSGEMMMEKGEIK | |
| NCSFNISTSIRGKVQKEYAFFYKLDIIPIDNDTTSYTLTSCNTS | |
| VITQACPKVSFEPIPIHYCAPAGFAILKCNNKTFNGTGPCTNVS | |
| TVQCTHGIRPVVSTQLLLNGSLAEEEVVIRSANFTDNAKTIIV | |
| QLNQSVEINCTRPNNNTRKSIRIQRGPGRAFVTIGKIGNMRQA | |
| HCNISRAKWNATLKQIASKLREQFGNNKTIIFKQSSGGDPEIV | |
| THSFNCGGEFFYCNSTQLFNSTWFNSTWSTEGSNNTEGSDTIT | |
| LPCRIKQFINMWQEVGKAMYAPPISGQIRCSSNITGLLLTRDG | |
| GNNNNGSEIFRPGGGDMRDNWRSELYKYKVVKIEPLGVAPT | |
| KAKRRVVQREKRAVGIGALFLGFLGAAGSTMGARSMTLTV | |
| QARQLLSGIVQQQNNLLRAIEAQQHLLQLTVWGIKQLQARIL | |
| AVERAGKDQQLLGIWGCSGKLICTTAVPWNASWSNKSLEQI | |
| WNNMTWMEWDREINNYTSLIHSLIEESQNQQEKNEQELLEL | |
| DKWASLWNWFNITNWLWYIKIFIMIVGGLVGLRIVFAVLSIV | |
| NRVRQGYSPLSFQTHLPTPRGPDRPEGIEEEGGERDRDRSIRL | |
| VNGSLALIWDDLRSLCLFSYHRLRDLLLIVTRIVELLGRRGW | |
| EALKYWWNLLQYWSQELKNSAVSLLNATAIAVAEGTDRVIE | |
| VVQGACRAIRHIPRRIRQGLERILL | |
| MRVKEKYQHLWRWGWKWGTMLLGILMICSATEKLWVTVY | SEQ |
| YGVPVWKEATTTLFCASDAKAYDTEVHNVWATHACVPTDP | ID NO: |
| NPQEVVLVNVTENFNMWKNDMVEQMHEDIISLWDQSLKPC | 224 |
| VKLTPLCVSLKCTDLGNATNTNSSNTNSSSGEMMMEKGEIK | |
| NCSFNISTSIRGKVQKEYAFFYKLDIIPIDNDTTSYTLTSCNTS | |
| VITQACPKVSFEPIPIHYCAPAGFAILKCNNKTFNGTGPCTNVS | |
| TVQCTHGIRPVVSTQLLLNGSLAEEEVVIRSANFTDNAKTIIV | |
| QLNQSVEINCTRPNNNTRKSIRIQRGPGRAFVTIGKIGNMRQA | |
| HCNISRAKWNATLKQIASKLREQFGNNKTIIFKQSSGGDPEIV | |
| THSFNCGGEFFYCNSTQLFNSTWFNSTWSTEGSNNTEGSDTIT | |
| LPCRIKQFINMWQEVGKAMYAPPISGQIRCSSNITGLLLTRDG | |
| GNNNNGSEIFRPGGGDMRDNWRSELYKYKVVKIEPLGVAPT | |
| KAKRRVVQREKRAVGIGALFLGFLGAAGSTMGARSMTLTV | |
| QARQLLSGIVQQQNNLLRAIEAQQHLLQLTVWGIKQLQARIL | |
| AVERARKDQQLLGIWGCSGKLICTTAVPWNASWSNKSLEQI | |
| WNNMTWMEWDREINNYTSLIHSLIEESQNQQEKNEQELLEL | |
| DKWASLWNWFNITNWLWYIKIFIMIVGGLVGLRIVFAVLSIV | |
| NRVRQGYSPLSFQTHLPTPRGPDRPEGIEEEGGERDRDRSIRL | |
| VNGSLALIWDDLRSLCLFSYHRLRDLLLIVTRIVELLGRRGW | |
| EALKYWWNLLQYWSQELKNSAVSLLNATAIAVAEGTDRVIE | |
| VVQGACRAIRHIPRRIRQGLERILL | |
| MRVKEKYQHLWRWGWKWGTMLLGILMICSATEKLWVTVY | SEQ |
| YGVPVWKEATTTLFCASDAKAYDTEVHNVWATHACVPTDP | ID NO: |
| NPQEVVLVNVTENFNMWKNDMVEQMHEDIISLWDQSLKPC | 225 |
| VKLTPLCVSLKCTDLGNATNTNSSNTNSSSGEMMMEKGEIK | |
| NCSFNISTSIRGKVQKEYAFFYKLDIIPIDNDTTSYTLTSCNTS | |
| VITQACPKVSFEPIPIHYCAPAGFAILKCNNKTFNGTGPCTNVS | |
| TVQCTHGIRPVVSTQLLLNGSLAEEEVVIRSANFTDNAKTIIV | |
| QLNQSVEINCTRPNNNTRKSIRIQRGPGRAFVTIGKIGNMRQA | |
| HCNISRAKWNATLKQIASKLREQFGNNKTIIFKQSSGGDPEIV | |
| THSFNCGGEFFYCNSTQLFNSTWFNSTWSTEGSNNTEGSDTIT | |
| LPCRIKQFINMWQEVGKAMYAPPISGQIRCSSNITGLLLTRDG | |
| GNNNNGSEIFRPGGGDMRDNWRSELYKYKVVKIEPLGVAPT | |
| KAKRRVVQREKRAVGIGALFLGFLGAAGSTMGARSMTLTV | |
| QARQLLSGIVQQQNNLLRAIEAQQHLLQLTVWGIKQLQARIL | |
| AVERFAKDQQLLGIWGCSGKLICTTAVPWNASWSNKSLEQI | |
| WNNMTWMEWDREINNYTSLIHSLIEESQNQQEKNEQELLEL | |
| DKWASLWNWFNITNWLWYIKIFIMIVGGLVGLRIVFAVLSIV | |
| NRVRQGYSPLSFQTHLPTPRGPDRPEGIEEEGGERDRDRSIRL | |
| VNGSLALIWDDLRSLCLFSYHRLRDLLLIVTRIVELLGRRGW | |
| EALKYWWNLLQYWSQELKNSAVSLLNATAIAVAEGTDRVIE | |
| VVQGACRAIRHIPRRIRQGLERILL | |
| MRVKEKYQHLWRWGWKWGTMLLGILMICSATEKLWVTVY | SEQ |
| YGVPVWKEATTTLFCASDAKAYDTEVHNVWATHACVPTDP | ID NO: |
| NPQEVVLVNVTENFNMWKNDMVEQMHEDIISLWDQSLKPC | 226 |
| VKLTPLCVSLKCTDLGNATNTNSSNTNSSSGEMMMEKGEIK | |
| NCSFNISTSIRGKVQKEYAFFYKLDIIPIDNDTTSYTLTSCNTS | |
| VITQACPKVSFEPIPIHYCAPAGFAILKCNNKTFNGTGPCTNVS | |
| TVQCTHGIRPVVSTQLLLNGSLAEEEVVIRSANFTDNAKTIIV | |
| QLNQSVEINCTRPNNNTRKSIRIQRGPGRAFVTIGKIGNMRQA | |
| HCNISRAKWNATLKQIASKLREQFGNNKTIIFKQSSGGDPEIV | |
| THSFNCGGEFFYCNSTQLFNSTWFNSTWSTEGSNNTEGSDTIT | |
| LPCRIKQFINMWQEVGKAMYAPPISGQIRCSSNITGLLLTRDG | |
| GNNNNGSEIFRPGGGDMRDNWRSELYKYKVVKIEPLGVAPT | |
| KAKRRVVQREKRAVGIGALFLGFLGAAGSTMGARSMTLTV | |
| QARQLLSGIVQQQNNLLRAIEAQQHLLQLTVWGIKQLQARIL | |
| AVERFFKDQQLLGIWGCSGKLICTTAVPWNASWSNKSLEQI | |
| WNNMTWMEWDREINNYTSLIHSLIEESQNQQEKNEQELLEL | |
| DKWASLWNWFNITNWLWYIKIFIMIVGGLVGLRIVFAVLSIV | |
| NRVRQGYSPLSFQTHLPTPRGPDRPEGIEEEGGERDRDRSIRL | |
| VNGSLALIWDDLRSLCLFSYHRLRDLLLIVTRIVELLGRRGW | |
| EALKYWWNLLQYWSQELKNSAVSLLNATAIAVAEGTDRVIE | |
| VVQGACRAIRHIPRRIRQGLERILL | |
| MRVKEKYQHLWRWGWKWGTMLLGILMICSATEKLWVTVY | SEQ |
| YGVPVWKEATTTLFCASDAKAYDTEVHNVWATHACVPTDP | ID NO: |
| NPQEVVLVNVTENFNMWKNDMVEQMHEDIISLWDQSLKPC | 227 |
| VKLTPLCVSLKCTDLGNATNTNSSNTNSSSGEMMMEKGEIK | |
| NCSFNISTSIRGKVQKEYAFFYKLDIIPIDNDTTSYTLTSCNTS | |
| VITQACPKVSFEPIPIHYCAPAGFAILKCNNKTFNGTGPCTNVS | |
| TVQCTHGIRPVVSTQLLLNGSLAEEEVVIRSANFTDNAKTIIV | |
| QLNQSVEINCTRPNNNTRKSIRIQRGPGRAFVTIGKIGNMRQA | |
| HCNISRAKWNATLKQIASKLREQFGNNKTIIFKQSSGGDPEIV | |
| THSFNCGGEFFYCNSTQLFNSTWFNSTWSTEGSNNTEGSDTIT | |
| LPCRIKQFINMWQEVGKAMYAPPISGQIRCSSNITGLLLTRDG | |
| GNNNNGSEIFRPGGGDMRDNWRSELYKYKVVKIEPLGVAPT | |
| KAKRRVVQREKRAVGIGALFLGFLGAAGSTMGARSMTLTV | |
| QARQLLSGIVQQQNNLLRAIEAQQHLLQLTVWGIKQLQARIL | |
| AVERFGKDQQLLGIWGCSGKLICTTAVPWNASWSNKSLEQI | |
| WNNMTWMEWDREINNYTSLIHSLIEESQNQQEKNEQELLEL | |
| DKWASLWNWFNITNWLWYIKIFIMIVGGLVGLRIVFAVLSIV | |
| NRVRQGYSPLSFQTHLPTPRGPDRPEGIEEEGGERDRDRSIRL | |
| VNGSLALIWDDLRSLCLFSYHRLRDLLLIVTRIVELLGRRGW | |
| EALKYWWNLLQYWSQELKNSAVSLLNATAIAVAEGTDRVIE | |
| VVQGACRAIRHIPRRIRQGLERILL | |
| MRVKEKYQHLWRWGWKWGTMLLGILMICSATEKLWVTVY | SEQ |
| YGVPVWKEATTTLFCASDAKAYDTEVHNVWATHACVPTDP | ID NO: |
| NPQEVVLVNVTENFNMWKNDMVEQMHEDIISLWDQSLKPC | 228 |
| VKLTPLCVSLKCTDLGNATNTNSSNTNSSSGEMMMEKGEIK | |
| NCSFNISTSIRGKVQKEYAFFYKLDIIPIDNDTTSYTLTSCNTS | |
| VITQACPKVSFEPIPIHYCAPAGFAILKCNNKTFNGTGPCTNVS | |
| TVQCTHGIRPVVSTQLLLNGSLAEEEVVIRSANFTDNAKTIIV | |
| QLNQSVEINCTRPNNNTRKSIRIQRGPGRAFVTIGKIGNMRQA | |
| HCNISRAKWNATLKQIASKLREQFGNNKTIIFKQSSGGDPEIV | |
| THSFNCGGEFFYCNSTQLFNSTWFNSTWSTEGSNNTEGSDTIT | |
| LPCRIKQFINMWQEVGKAMYAPPISGQIRCSSNITGLLLTRDG | |
| GNNNNGSEIFRPGGGDMRDNWRSELYKYKVVKIEPLGVAPT | |
| KAKRRVVQREKRAVGIGALFLGFLGAAGSTMGARSMTLTV | |
| QARQLLSGIVQQQNNLLRAIEAQQHLLQLTVWGIKQLQARIL | |
| AVERFRKDQQLLGIWGCSGKLICTTAVPWNASWSNKSLEQI | |
| WNNMTWMEWDREINNYTSLIHSLIEESQNQQEKNEQELLEL | |
| DKWASLWNWFNITNWLWYIKIFIMIVGGLVGLRIVFAVLSIV | |
| NRVRQGYSPLSFQTHLPTPRGPDRPEGIEEEGGERDRDRSIRL | |
| VNGSLALIWDDLRSLCLFSYHRLRDLLLIVTRIVELLGRRGW | |
| EALKYWWNLLQYWSQELKNSAVSLLNATAIAVAEGTDRVIE | |
| VVQGACRAIRHIPRRIRQGLERILL | |
| MRVKEKYQHLWRWGWKWGTMLLGILMICSATEKLWVTVY | SEQ |
| YGVPVWKEATTTLFCASDAKAYDTEVHNVWATHACVPTDP | ID NO: |
| NPQEVVLVNVTENFNMWKNDMVEQMHEDIISLWDQSLKPC | 229 |
| VKLTPLCVSLKCTDLGNATNTNSSNTNSSSGEMMMEKGEIK | |
| NCSFNISTSIRGKVQKEYAFFYKLDIIPIDNDTTSYTLTSCNTS | |
| VITQACPKVSFEPIPIHYCAPAGFAILKCNNKTFNGTGPCTNVS | |
| TVQCTHGIRPVVSTQLLLNGSLAEEEVVIRSANFTDNAKTIIV | |
| QLNQSVEINCTRPNNNTRKSIRIQRGPGRAFVTIGKIGNMRQA | |
| HCNISRAKWNATLKQIASKLREQFGNNKTIIFKQSSGGDPEIV | |
| THSFNCGGEFFYCNSTQLFNSTWFNSTWSTEGSNNTEGSDTIT | |
| LPCRIKQFINMWQEVGKAMYAPPISGQIRCSSNITGLLLTRDG | |
| GNNNNGSEIFRPGGGDMRDNWRSELYKYKVVKIEPLGVAPT | |
| KAKRRVVQREKRAVGIGALFLGFLGAAGSTMGARSMTLTV | |
| QARQLLSGIVQQQNNLLRAIEAQQHLLQLTVWGIKQLQARIL | |
| AVERGAKDQQLLGIWGCSGKLICTTAVPWNASWSNKSLEQI | |
| WNNMTWMEWDREINNYTSLIHSLIEESQNQQEKNEQELLEL | |
| DKWASLWNWFNITNWLWYIKIFIMIVGGLVGLRIVFAVLSIV | |
| NRVRQGYSPLSFQTHLPTPRGPDRPEGIEEEGGERDRDRSIRL | |
| VNGSLALIWDDLRSLCLFSYHRLRDLLLIVTRIVELLGRRGW | |
| EALKYWWNLLQYWSQELKNSAVSLLNATAIAVAEGTDRVIE | |
| VVQGACRAIRHIPRRIRQGLERILL | |
| MRVKEKYQHLWRWGWKWGTMLLGILMICSATEKLWVTVY | SEQ |
| YGVPVWKEATTTLFCASDAKAYDTEVHNVWATHACVPTDP | ID NO: |
| NPQEVVLVNVTENFNMWKNDMVEQMHEDIISLWDQSLKPC | 230 |
| VKLTPLCVSLKCTDLGNATNTNSSNTNSSSGEMMMEKGEIK | |
| NCSFNISTSIRGKVQKEYAFFYKLDIIPIDNDTTSYTLTSCNTS | |
| VITQACPKVSFEPIPIHYCAPAGFAILKCNNKTFNGTGPCTNVS | |
| TVQCTHGIRPVVSTQLLLNGSLAEEEVVIRSANFTDNAKTIIV | |
| QLNQSVEINCTRPNNNTRKSIRIQRGPGRAFVTIGKIGNMRQA | |
| HCNISRAKWNATLKQIASKLREQFGNNKTIIFKQSSGGDPEIV | |
| THSFNCGGEFFYCNSTQLFNSTWFNSTWSTEGSNNTEGSDTIT | |
| LPCRIKQFINMWQEVGKAMYAPPISGQIRCSSNITGLLLTRDG | |
| GNNNNGSEIFRPGGGDMRDNWRSELYKYKVVKIEPLGVAPT | |
| KAKRRVVQREKRAVGIGALFLGFLGAAGSTMGARSMTLTV | |
| QARQLLSGIVQQQNNLLRAIEAQQHLLQLTVWGIKQLQARIL | |
| AVERGFKDQQLLGIWGCSGKLICTTAVPWNASWSNKSLEQI | |
| WNNMTWMEWDREINNYTSLIHSLIEESQNQQEKNEQELLEL | |
| DKWASLWNWFNITNWLWYIKIFIMIVGGLVGLRIVFAVLSIV | |
| NRVRQGYSPLSFQTHLPTPRGPDRPEGIEEEGGERDRDRSIRL | |
| VNGSLALIWDDLRSLCLFSYHRLRDLLLIVTRIVELLGRRGW | |
| EALKYWWNLLQYWSQELKNSAVSLLNATAIAVAEGTDRVIE | |
| VVQGACRAIRHIPRRIRQGLERILL | |
| MRVKEKYQHLWRWGWKWGTMLLGILMICSATEKLWVTVY | SEQ |
| YGVPVWKEATTTLFCASDAKAYDTEVHNVWATHACVPTDP | ID NO: |
| NPQEVVLVNVTENFNMWKNDMVEQMHEDIISLWDQSLKPC | 231 |
| VKLTPLCVSLKCTDLGNATNTNSSNTNSSSGEMMMEKGEIK | |
| NCSFNISTSIRGKVQKEYAFFYKLDIIPIDNDTTSYTLTSCNTS | |
| VITQACPKVSFEPIPIHYCAPAGFAILKCNNKTFNGTGPCTNVS | |
| TVQCTHGIRPVVSTQLLLNGSLAEEEVVIRSANFTDNAKTIIV | |
| QLNQSVEINCTRPNNNTRKSIRIQRGPGRAFVTIGKIGNMRQA | |
| HCNISRAKWNATLKQIASKLREQFGNNKTIIFKQSSGGDPEIV | |
| THSFNCGGEFFYCNSTQLFNSTWFNSTWSTEGSNNTEGSDTIT | |
| LPCRIKQFINMWQEVGKAMYAPPISGQIRCSSNITGLLLTRDG | |
| GNNNNGSEIFRPGGGDMRDNWRSELYKYKVVKIEPLGVAPT | |
| KAKRRVVQREKRAVGIGALFLGFLGAAGSTMGARSMTLTV | |
| QARQLLSGIVQQQNNLLRAIEAQQHLLQLTVWGIKQLQARIL | |
| AVERGGKDQQLLGIWGCSGKLICTTAVPWNASWSNKSLEQI | |
| WNNMTWMEWDREINNYTSLIHSLIEESQNQQEKNEQELLEL | |
| DKWASLWNWFNITNWLWYIKIFIMIVGGLVGLRIVFAVLSIV | |
| NRVRQGYSPLSFQTHLPTPRGPDRPEGIEEEGGERDRDRSIRL | |
| VNGSLALIWDDLRSLCLFSYHRLRDLLLIVTRIVELLGRRGW | |
| EALKYWWNLLQYWSQELKNSAVSLLNATAIAVAEGTDRVIE | |
| VVQGACRAIRHIPRRIRQGLERILL | |
| MRVKEKYQHLWRWGWKWGTMLLGILMICSATEKLWVTVY | SEQ |
| YGVPVWKEATTTLFCASDAKAYDTEVHNVWATHACVPTDP | ID NO: |
| NPQEVVLVNVTENFNMWKNDMVEQMHEDIISLWDQSLKPC | 232 |
| VKLTPLCVSLKCTDLGNATNTNSSNTNSSSGEMMMEKGEIK | |
| NCSFNISTSIRGKVQKEYAFFYKLDIIPIDNDTTSYTLTSCNTS | |
| VITQACPKVSFEPIPIHYCAPAGFAILKCNNKTFNGTGPCTNVS | |
| TVQCTHGIRPVVSTQLLLNGSLAEEEVVIRSANFTDNAKTIIV | |
| QLNQSVEINCTRPNNNTRKSIRIQRGPGRAFVTIGKIGNMRQA | |
| HCNISRAKWNATLKQIASKLREQFGNNKTIIFKQSSGGDPEIV | |
| THSFNCGGEFFYCNSTQLFNSTWFNSTWSTEGSNNTEGSDTIT | |
| LPCRIKQFINMWQEVGKAMYAPPISGQIRCSSNITGLLLTRDG | |
| GNNNNGSEIFRPGGGDMRDNWRSELYKYKVVKIEPLGVAPT | |
| KAKRRVVQREKRAVGIGALFLGFLGAAGSTMGARSMTLTV | |
| QARQLLSGIVQQQNNLLRAIEAQQHLLQLTVWGIKQLQARIL | |
| AVERGRKDQQLLGIWGCSGKLICTTAVPWNASWSNKSLEQI | |
| WNNMTWMEWDREINNYTSLIHSLIEESQNQQEKNEQELLEL | |
| DKWASLWNWFNITNWLWYIKIFIMIVGGLVGLRIVFAVLSIV | |
| NRVRQGYSPLSFQTHLPTPRGPDRPEGIEEEGGERDRDRSIRL | |
| VNGSLALIWDDLRSLCLFSYHRLRDLLLIVTRIVELLGRRGW | |
| EALKYWWNLLQYWSQELKNSAVSLLNATAIAVAEGTDRVIE | |
| VVQGACRAIRHIPRRIRQGLERILL | |
| MRVKEKYQHLWRWGWKWGTMLLGILMICSATEKLWVTVY | SEQ |
| YGVPVWKEATTTLFCASDAKAYDTEVHNVWATHACVPTDP | ID NO: |
| NPQEVVLVNVTENFNMWKNDMVEQMHEDIISLWDQSLKPC | 233 |
| VKLTPLCVSLKCTDLGNATNTNSSNTNSSSGEMMMEKGEIK | |
| NCSFNISTSIRGKVQKEYAFFYKLDIIPIDNDTTSYTLTSCNTS | |
| VITQACPKVSFEPIPIHYCAPAGFAILKCNNKTFNGTGPCTNVS | |
| TVQCTHGIRPVVSTQLLLNGSLAEEEVVIRSANFTDNAKTIIV | |
| QLNQSVEINCTRPNNNTRKSIRIQRGPGRAFVTIGKIGNMRQA | |
| HCNISRAKWNATLKQIASKLREQFGNNKTIIFKQSSGGDPEIV | |
| THSFNCGGEFFYCNSTQLFNSTWFNSTWSTEGSNNTEGSDTIT | |
| LPCRIKQFINMWQEVGKAMYAPPISGQIRCSSNITGLLLTRDG | |
| GNNNNGSEIFRPGGGDMRDNWRSELYKYKVVKIEPLGVAPT | |
| KAKRRVVQREKRAVGIGALFLGFLGAAGSTMGARSMTLTV | |
| QARQLLSGIVQQQNNLLRAIEAQQHLLQLTVWGIKQLQARIL | |
| AVERLAKDQQLLGIWGCSGKLICTTAVPWNASWSNKSLEQI | |
| WNNMTWMEWDREINNYTSLIHSLIEESQNQQEKNEQELLEL | |
| DKWASLWNWFNITNWLWYIKIFIMIVGGLVGLRIVFAVLSIV | |
| NRVRQGYSPLSFQTHLPTPRGPDRPEGIEEEGGERDRDRSIRL | |
| VNGSLALIWDDLRSLCLFSYHRLRDLLLIVTRIVELLGRRGW | |
| EALKYWWNLLQYWSQELKNSAVSLLNATAIAVAEGTDRVIE | |
| VVQGACRAIRHIPRRIRQGLERILL | |
| MRVKEKYQHLWRWGWKWGTMLLGILMICSATEKLWVTVY | SEQ |
| YGVPVWKEATTTLFCASDAKAYDTEVHNVWATHACVPTDP | ID NO: |
| NPQEVVLVNVTENFNMWKNDMVEQMHEDIISLWDQSLKPC | 234 |
| VKLTPLCVSLKCTDLGNATNTNSSNTNSSSGEMMMEKGEIK | |
| NCSFNISTSIRGKVQKEYAFFYKLDIIPIDNDTTSYTLTSCNTS | |
| VITQACPKVSFEPIPIHYCAPAGFAILKCNNKTFNGTGPCTNVS | |
| TVQCTHGIRPVVSTQLLLNGSLAEEEVVIRSANFTDNAKTIIV | |
| QLNQSVEINCTRPNNNTRKSIRIQRGPGRAFVTIGKIGNMRQA | |
| HCNISRAKWNATLKQIASKLREQFGNNKTIIFKQSSGGDPEIV | |
| THSFNCGGEFFYCNSTQLFNSTWFNSTWSTEGSNNTEGSDTIT | |
| LPCRIKQFINMWQEVGKAMYAPPISGQIRCSSNITGLLLTRDG | |
| GNNNNGSEIFRPGGGDMRDNWRSELYKYKVVKIEPLGVAPT | |
| KAKRRVVQREKRAVGIGALFLGFLGAAGSTMGARSMTLTV | |
| QARQLLSGIVQQQNNLLRAIEAQQHLLQLTVWGIKQLQARIL | |
| AVERLFKDQQLLGIWGCSGKLICTTAVPWNASWSNKSLEQI | |
| WNNMTWMEWDREINNYTSLIHSLIEESQNQQEKNEQELLEL | |
| DKWASLWNWFNITNWLWYIKIFIMIVGGLVGLRIVFAVLSIV | |
| NRVRQGYSPLSFQTHLPTPRGPDRPEGIEEEGGERDRDRSIRL | |
| VNGSLALIWDDLRSLCLFSYHRLRDLLLIVTRIVELLGRRGW | |
| EALKYWWNLLQYWSQELKNSAVSLLNATAIAVAEGTDRVIE | |
| VVQGACRAIRHIPRRIRQGLERILL | |
| MRVKEKYQHLWRWGWKWGTMLLGILMICSATEKLWVTVY | SEQ |
| YGVPVWKEATTTLFCASDAKAYDTEVHNVWATHACVPTDP | ID NO: |
| NPQEVVLVNVTENFNMWKNDMVEQMHEDIISLWDQSLKPC | 235 |
| VKLTPLCVSLKCTDLGNATNTNSSNTNSSSGEMMMEKGEIK | |
| NCSFNISTSIRGKVQKEYAFFYKLDIIPIDNDTTSYTLTSCNTS | |
| VITQACPKVSFEPIPIHYCAPAGFAILKCNNKTFNGTGPCTNVS | |
| TVQCTHGIRPVVSTQLLLNGSLAEEEVVIRSANFTDNAKTIIV | |
| QLNQSVEINCTRPNNNTRKSIRIQRGPGRAFVTIGKIGNMRQA | |
| HCNISRAKWNATLKQIASKLREQFGNNKTIIFKQSSGGDPEIV | |
| THSFNCGGEFFYCNSTQLFNSTWFNSTWSTEGSNNTEGSDTIT | |
| LPCRIKQFINMWQEVGKAMYAPPISGQIRCSSNITGLLLTRDG | |
| GNNNNGSEIFRPGGGDMRDNWRSELYKYKVVKIEPLGVAPT | |
| KAKRRVVQREKRAVGIGALFLGFLGAAGSTMGARSMTLTV | |
| QARQLLSGIVQQQNNLLRAIEAQQHLLQLTVWGIKQLQARIL | |
| AVERLGKDQQLLGIWGCSGKLICTTAVPWNASWSNKSLEQI | |
| WNNMTWMEWDREINNYTSLIHSLIEESQNQQEKNEQELLEL | |
| DKWASLWNWFNITNWLWYIKIFIMIVGGLVGLRIVFAVLSIV | |
| NRVRQGYSPLSFQTHLPTPRGPDRPEGIEEEGGERDRDRSIRL | |
| VNGSLALIWDDLRSLCLFSYHRLRDLLLIVTRIVELLGRRGW | |
| EALKYWWNLLQYWSQELKNSAVSLLNATAIAVAEGTDRVIE | |
| VVQGACRAIRHIPRRIRQGLERILL | |
| MRVKEKYQHLWRWGWKWGTMLLGILMICSATEKLWVTVY | SEQ |
| YGVPVWKEATTTLFCASDAKAYDTEVHNVWATHACVPTDP | ID NO: |
| NPQEVVLVNVTENFNMWKNDMVEQMHEDIISLWDQSLKPC | 236 |
| VKLTPLCVSLKCTDLGNATNTNSSNTNSSSGEMMMEKGEIK | |
| NCSFNISTSIRGKVQKEYAFFYKLDIIPIDNDTTSYTLTSCNTS | |
| VITQACPKVSFEPIPIHYCAPAGFAILKCNNKTFNGTGPCTNVS | |
| TVQCTHGIRPVVSTQLLLNGSLAEEEVVIRSANFTDNAKTIIV | |
| QLNQSVEINCTRPNNNTRKSIRIQRGPGRAFVTIGKIGNMRQA | |
| HCNISRAKWNATLKQIASKLREQFGNNKTIIFKQSSGGDPEIV | |
| THSFNCGGEFFYCNSTQLFNSTWFNSTWSTEGSNNTEGSDTIT | |
| LPCRIKQFINMWQEVGKAMYAPPISGQIRCSSNITGLLLTRDG | |
| GNNNNGSEIFRPGGGDMRDNWRSELYKYKVVKIEPLGVAPT | |
| KAKRRVVQREKRAVGIGALFLGFLGAAGSTMGARSMTLTV | |
| QARQLLSGIVQQQNNLLRAIEAQQHLLQLTVWGIKQLQARIL | |
| AVERLRKDQQLLGIWGCSGKLICTTAVPWNASWSNKSLEQI | |
| WNNMTWMEWDREINNYTSLIHSLIEESQNQQEKNEQELLEL | |
| DKWASLWNWFNITNWLWYIKIFIMIVGGLVGLRIVFAVLSIV | |
| NRVRQGYSPLSFQTHLPTPRGPDRPEGIEEEGGERDRDRSIRL | |
| VNGSLALIWDDLRSLCLFSYHRLRDLLLIVTRIVELLGRRGW | |
| EALKYWWNLLQYWSQELKNSAVSLLNATAIAVAEGTDRVIE | |
| VVQGACRAIRHIPRRIRQGLERILL | |
| MRVKEKYQHLWRWGWKWGTMLLGILMICSATEKLWVTVY | SEQ |
| YGVPVWKEATTTLFCASDAKAYDTEVHNVWATHACVPTDP | ID NO: |
| NPQEVVLVNVTENFNMWKNDMVEQMHEDIISLWDQSLKPC | 237 |
| VKLTPLCVSLKCTDLGNATNTNSSNTNSSSGEMMMEKGEIK | |
| NCSFNISTSIRGKVQKEYAFFYKLDIIPIDNDTTSYTLTSCNTS | |
| VITQACPKVSFEPIPIHYCAPAGFAILKCNNKTFNGTGPCTNVS | |
| TVQCTHGIRPVVSTQLLLNGSLAEEEVVIRSANFTDNAKTIIV | |
| QLNQSVEINCTRPNNNTRKSIRIQRGPGRAFVTIGKIGNMRQA | |
| HCNISRAKWNATLKQIASKLREQFGNNKTIIFKQSSGGDPEIV | |
| THSFNCGGEFFYCNSTQLFNSTWFNSTWSTEGSNNTEGSDTIT | |
| LPCRIKQFINMWQEVGKAMYAPPISGQIRCSSNITGLLLTRDG | |
| GNNNNGSEIFRPGGGDMRDNWRSELYKYKVVKIEPLGVAPT | |
| KAKRRVVQREKRAVGIGALFLGFLGAAGSTMGARSMTLTV | |
| QARQLLSGIVQQQNNLLRAIEAQQHLLQLTVWGIKQLQARIL | |
| AVERRAKDQQLLGIWGCSGKLICTTAVPWNASWSNKSLEQI | |
| WNNMTWMEWDREINNYTSLIHSLIEESQNQQEKNEQELLEL | |
| DKWASLWNWFNITNWLWYIKIFIMIVGGLVGLRIVFAVLSIV | |
| NRVRQGYSPLSFQTHLPTPRGPDRPEGIEEEGGERDRDRSIRL | |
| VNGSLALIWDDLRSLCLFSYHRLRDLLLIVTRIVELLGRRGW | |
| EALKYWWNLLQYWSQELKNSAVSLLNATAIAVAEGTDRVIE | |
| VVQGACRAIRHIPRRIRQGLERILL | |
| MRVKEKYQHLWRWGWKWGTMLLGILMICSATEKLWVTVY | SEQ |
| YGVPVWKEATTTLFCASDAKAYDTEVHNVWATHACVPTDP | ID NO: |
| NPQEVVLVNVTENFNMWKNDMVEQMHEDIISLWDQSLKPC | 238 |
| VKLTPLCVSLKCTDLGNATNTNSSNTNSSSGEMMMEKGEIK | |
| NCSFNISTSIRGKVQKEYAFFYKLDIIPIDNDTTSYTLTSCNTS | |
| VITQACPKVSFEPIPIHYCAPAGFAILKCNNKTFNGTGPCTNVS | |
| TVQCTHGIRPVVSTQLLLNGSLAEEEVVIRSANFTDNAKTIIV | |
| QLNQSVEINCTRPNNNTRKSIRIQRGPGRAFVTIGKIGNMRQA | |
| HCNISRAKWNATLKQIASKLREQFGNNKTIIFKQSSGGDPEIV | |
| THSFNCGGEFFYCNSTQLFNSTWFNSTWSTEGSNNTEGSDTIT | |
| LPCRIKQFINMWQEVGKAMYAPPISGQIRCSSNITGLLLTRDG | |
| GNNNNGSEIFRPGGGDMRDNWRSELYKYKVVKIEPLGVAPT | |
| KAKRRVVQREKRAVGIGALFLGFLGAAGSTMGARSMTLTV | |
| QARQLLSGIVQQQNNLLRAIEAQQHLLQLTVWGIKQLQARIL | |
| AVERRFKDQQLLGIWGCSGKLICTTAVPWNASWSNKSLEQI | |
| WNNMTWMEWDREINNYTSLIHSLIEESQNQQEKNEQELLEL | |
| DKWASLWNWFNITNWLWYIKIFIMIVGGLVGLRIVFAVLSIV | |
| NRVRQGYSPLSFQTHLPTPRGPDRPEGIEEEGGERDRDRSIRL | |
| VNGSLALIWDDLRSLCLFSYHRLRDLLLIVTRIVELLGRRGW | |
| EALKYWWNLLQYWSQELKNSAVSLLNATAIAVAEGTDRVIE | |
| VVQGACRAIRHIPRRIRQGLERILL | |
| MRVKEKYQHLWRWGWKWGTMLLGILMICSATEKLWVTVY | SEQ |
| YGVPVWKEATTTLFCASDAKAYDTEVHNVWATHACVPTDP | ID NO: |
| NPQEVVLVNVTENFNMWKNDMVEQMHEDIISLWDQSLKPC | 239 |
| VKLTPLCVSLKCTDLGNATNTNSSNTNSSSGEMMMEKGEIK | |
| NCSFNISTSIRGKVQKEYAFFYKLDIIPIDNDTTSYTLTSCNTS | |
| VITQACPKVSFEPIPIHYCAPAGFAILKCNNKTFNGTGPCTNVS | |
| TVQCTHGIRPVVSTQLLLNGSLAEEEVVIRSANFTDNAKTIIV | |
| QLNQSVEINCTRPNNNTRKSIRIQRGPGRAFVTIGKIGNMRQA | |
| HCNISRAKWNATLKQIASKLREQFGNNKTIIFKQSSGGDPEIV | |
| THSFNCGGEFFYCNSTQLFNSTWFNSTWSTEGSNNTEGSDTIT | |
| LPCRIKQFINMWQEVGKAMYAPPISGQIRCSSNITGLLLTRDG | |
| GNNNNGSEIFRPGGGDMRDNWRSELYKYKVVKIEPLGVAPT | |
| KAKRRVVQREKRAVGIGALFLGFLGAAGSTMGARSMTLTV | |
| QARQLLSGIVQQQNNLLRAIEAQQHLLQLTVWGIKQLQARIL | |
| AVERRGKDQQLLGIWGCSGKLICTTAVPWNASWSNKSLEQI | |
| WNNMTWMEWDREINNYTSLIHSLIEESQNQQEKNEQELLEL | |
| DKWASLWNWFNITNWLWYIKIFIMIVGGLVGLRIVFAVLSIV | |
| NRVRQGYSPLSFQTHLPTPRGPDRPEGIEEEGGERDRDRSIRL | |
| VNGSLALIWDDLRSLCLFSYHRLRDLLLIVTRIVELLGRRGW | |
| EALKYWWNLLQYWSQELKNSAVSLLNATAIAVAEGTDRVIE | |
| VVQGACRAIRHIPRRIRQGLERILL | |
| MRVKEKYQHLWRWGWKWGTMLLGILMICSATEKLWVTVY | SEQ |
| YGVPVWKEATTTLFCASDAKAYDTEVHNVWATHACVPTDP | ID NO: |
| NPQEVVLVNVTENFNMWKNDMVEQMHEDIISLWDQSLKPC | 240 |
| VKLTPLCVSLKCTDLGNATNTNSSNTNSSSGEMMMEKGEIK | |
| NCSFNISTSIRGKVQKEYAFFYKLDIIPIDNDTTSYTLTSCNTS | |
| VITQACPKVSFEPIPIHYCAPAGFAILKCNNKTFNGTGPCTNVS | |
| TVQCTHGIRPVVSTQLLLNGSLAEEEVVIRSANFTDNAKTIIV | |
| QLNQSVEINCTRPNNNTRKSIRIQRGPGRAFVTIGKIGNMRQA | |
| HCNISRAKWNATLKQIASKLREQFGNNKTIIFKQSSGGDPEIV | |
| THSFNCGGEFFYCNSTQLFNSTWFNSTWSTEGSNNTEGSDTIT | |
| LPCRIKQFINMWQEVGKAMYAPPISGQIRCSSNITGLLLTRDG | |
| GNNNNGSEIFRPGGGDMRDNWRSELYKYKVVKIEPLGVAPT | |
| KAKRRVVQREKRAVGIGALFLGFLGAAGSTMGARSMTLTV | |
| QARQLLSGIVQQQNNLLRAIEAQQHLLQLTVWGIKQLQARIL | |
| AVERRRKDQQLLGIWGCSGKLICTTAVPWNASWSNKSLEQI | |
| WNNMTWMEWDREINNYTSLIHSLIEESQNQQEKNEQELLEL | |
| DKWASLWNWFNITNWLWYIKIFIMIVGGLVGLRIVFAVLSIV | |
| NRVRQGYSPLSFQTHLPTPRGPDRPEGIEEEGGERDRDRSIRL | |
| VNGSLALIWDDLRSLCLFSYHRLRDLLLIVTRIVELLGRRGW | |
| EALKYWWNLLQYWSQELKNSAVSLLNATAIAVAEGTDRVIE | |
| VVQGACRAIRHIPRRIRQGLERILL | |

HIV-BH10

| | |
|---|---|
| MRVKEKYQHLWRWGWRWGTMLLGMLMICSATEKLWVTV | SEQ ID |
| YYGVPVWKEATTTLFCASDAKAYDTEVHNVWATHACVPTD | NO: |
| PNPQEVVLVNVTENFNMWKNDMVEQMHEDIISLWDQSLKP | 241 |
| CVKLTPLCVSLKCTDLKNDTNTNSSSGRMIMEKGEIKNCSFNI | |
| STSIRGKVQKEYAFFYKLDIIPIDNDTTSYTLTSCNTSVITQAC | |
| PKVSFEPIPIHYCAPAGFAILKCNNKTFNGTGPCTNVSTVQCT | |
| HGIRPVVSTQLLLNGSLAEEEVVIRSANFTDNAKTIIVQLNQS | |
| VEINCTRPNNNTRKSIRIQRGPGRAFVTIGKIGNMRQAHCNIS | |
| RAKWNNTLKQIDSKLREQFGNNKTIIFKQSSGGDPEIVTHSFN | |
| CGGEFFYCNSTQLFNSTWFNSTWSTKGSNNTEGSDTITLPCRI | |
| KQIINMWQEVGKAMYAPPISGQIRCSSNITGLLLTRDGGNSN | |
| NESEIFRPGGGDMRDNWRSELYKYKVVKIEPLGVAPTKAKR | |
| RVVQREKRAVGIGALFLGFLGAAGSTMGAASMTLTVQARQL | |
| LSGIVQQQNNLLRAIEAQQHLLQLTVWGIKQLQARILAVERA | |
| LKDQQLLGIWGCSGKLICTTAVPWNASWSNKSLEQIWNNM | |
| TWMEWDREINNYTSLIHSLIEESQNQQEKNEQELLELDKWAS | |
| LWNWFNITNWLWYIKLFIMIVGGLVGLRIVFAVLSVVNRVR | |
| QGYSPLSFQTHLPIPRGPDRPEGIEEEGGERDRDRSIRLVNGSL | |
| ALIWDDLRSLCLFSYHRLRDLLLIVTRIVELLGRRGWEALKY | |
| WWNLLQYWSQELKNSAVSLLNATAIAVAEGTDRVIEVVQG | |
| AYRAIRHIPRRIRQGLERILL | |
| MRVKEKYQHLWRWGWRWGTMLLGMLMICSATEKLWVTV | SEQ ID |
| YYGVPVWKEATTTLFCASDAKAYDTEVHNVWATHACVPTD | NO: |
| PNPQEVVLVNVTENFNMWKNDMVEQMHEDIISLWDQSLKP | 242 |
| CVKLTPLCVSLKCTDLKNDTNTNSSSGRMIMEKGEIKNCSFNI | |
| STSIRGKVQKEYAFFYKLDIIPIDNDTTSYTLTSCNTSVITQAC | |
| PKVSFEPIPIHYCAPAGFAILKCNNKTFNGTGPCTNVSTVQCT | |
| HGIRPVVSTQLLLNGSLAEEEVVIRSANFTDNAKTIIVQLNQS | |
| VEINCTRPNNNTRKSIRIQRGPGRAFVTIGKIGNMRQAHCNIS | |
| RAKWNNTLKQIDSKLREQFGNNKTIIFKQSSGGDPEIVTHSFN | |
| CGGEFFYCNSTQLFNSTWFNSTWSTKGSNNTEGSDTITLPCRI | |
| KQIINMWQEVGKAMYAPPISGQIRCSSNITGLLLTRDGGNSN | |
| NESEIFRPGGGDMRDNWRSELYKYKVVKIEPLGVAPTKAKR | |
| RVVQREKRAVGIGALFLGFLGAAGSTMGAASMTLTVQARQL | |
| LSGIVQQQNNLLRAIEAQQHLLQLTVWGIKQLQARILAVERF | |
| LKDQQLLGIWGCSGKLICTTAVPWNASWSNKSLEQIWNNM | |
| TWMEWDREINNYTSLIHSLIEESQNQQEKNEQELLELDKWAS | |
| LWNWFNITNWLWYIKLFIMIVGGLVGLRIVFAVLSVVNRVR | |
| QGYSPLSFQTHLPIPRGPDRPEGIEEEGGERDRDRSIRLVNGSL | |
| ALIWDDLRSLCLFSYHRLRDLLLIVTRIVELLGRRGWEALKY | |
| WWNLLQYWSQELKNSAVSLLNATAIAVAEGTDRVIEVVQG | |
| AYRAIRHIPRRIRQGLERILL | |
| MRVKEKYQHLWRWGWRWGTMLLGMLMICSATEKLWVTV | SEQ ID |
| YYGVPVWKEATTTLFCASDAKAYDTEVHNVWATHACVPTD | NO: |
| PNPQEVVLVNVTENFNMWKNDMVEQMHEDIISLWDQSLKP | 243 |
| CVKLTPLCVSLKCTDLKNDTNTNSSSGRMIMEKGEIKNCSFNI | |
| STSIRGKVQKEYAFFYKLDIIPIDNDTTSYTLTSCNTSVITQAC | |
| PKVSFEPIPIHYCAPAGFAILKCNNKTFNGTGPCTNVSTVQCT | |
| HGIRPVVSTQLLLNGSLAEEEVVIRSANFTDNAKTIIVQLNQS | |
| VEINCTRPNNNTRKSIRIQRGPGRAFVTIGKIGNMRQAHCNIS | |
| RAKWNNTLKQIDSKLREQFGNNKTIIFKQSSGGDPEIVTHSFN | |
| CGGEFFYCNSTQLFNSTWFNSTWSTKGSNNTEGSDTITLPCRI | |
| KQIINMWQEVGKAMYAPPISGQIRCSSNITGLLLTRDGGNSN | |
| NESEIFRPGGGDMRDNWRSELYKYKVVKIEPLGVAPTKAKR | |
| RVVQREKRAVGIGALFLGFLGAAGSTMGAASMTLTVQARQL | |
| LSGIVQQQNNLLRAIEAQQHLLQLTVWGIKQLQARILAVERG | |
| LKDQQLLGIWGCSGKLICTTAVPWNASWSNKSLEQIWNNM | |
| TWMEWDREINNYTSLIHSLIEESQNQQEKNEQELLELDKWAS | |
| LWNWFNITNWLWYIKLFIMIVGGLVGLRIVFAVLSVVNRVR | |
| QGYSPLSFQTHLPIPRGPDRPEGIEEEGGERDRDRSIRLVNGSL | |
| ALIWDDLRSLCLFSYHRLRDLLLIVTRIVELLGRRGWEALKY | |
| WWNLLQYWSQELKNSAVSLLNATAIAVAEGTDRVIEVVQG | |
| AYRAIRHIPRRIRQGLERILL | |
| MRVKEKYQHLWRWGWRWGTMLLGMLMICSATEKLWVTV | SEQ ID |
| YYGVPVWKEATTTLFCASDAKAYDTEVHNVWATHACVPTD | NO: |
| PNPQEVVLVNVTENFNMWKNDMVEQMHEDIISLWDQSLKP | 244 |
| CVKLTPLCVSLKCTDLKNDTNTNSSSGRMIMEKGEIKNCSFNI | |
| STSIRGKVQKEYAFFYKLDIIPIDNDTTSYTLTSCNTSVITQAC | |
| PKVSFEPIPIHYCAPAGFAILKCNNKTFNGTGPCTNVSTVQCT | |
| HGIRPVVSTQLLLNGSLAEEEVVIRSANFTDNAKTIIVQLNQS | |
| VEINCTRPNNNTRKSIRIQRGPGRAFVTIGKIGNMRQAHCNIS | |
| RAKWNNTLKQIDSKLREQFGNNKTIIFKQSSGGDPEIVTHSFN | |
| CGGEFFYCNSTQLFNSTWFNSTWSTKGSNNTEGSDTITLPCRI | |
| KQIINMWQEVGKAMYAPPISGQIRCSSNITGLLLTRDGGNSN | |
| NESEIFRPGGGDMRDNWRSELYKYKVVKIEPLGVAPTKAKR | |
| RVVQREKRAVGIGALFLGFLGAAGSTMGAASMTLTVQARQL | |
| LSGIVQQQNNLLRAIEAQQHLLQLTVWGIKQLQARILAVERL | |
| LKDQQLLGIWGCSGKLICTTAVPWNASWSNKSLEQIWNNM | |
| TWMEWDREINNYTSLIHSLIEESQNQQEKNEQELLELDKWAS | |
| LWNWFNITNWLWYIKLFIMIVGGLVGLRIVFAVLSVVNRVR | |
| QGYSPLSFQTHLPIPRGPDRPEGIEEEGGERDRDRSIRLVNGSL | |
| ALIWDDLRSLCLFSYHRLRDLLLIVTRIVELLGRRGWEALKY | |
| WWNLLQYWSQELKNSAVSLLNATAIAVAEGTDRVIEVVQG | |
| AYRAIRHIPRRIRQGLERILL | |
| MRVKEKYQHLWRWGWRWGTMLLGMLMICSATEKLWVTV | SEQ ID |
| YYGVPVWKEATTTLFCASDAKAYDTEVHNVWATHACVPTD | NO: |
| PNPQEVVLVNVTENFNMWKNDMVEQMHEDIISLWDQSLKP | 245 |
| CVKLTPLCVSLKCTDLKNDTNTNSSSGRMIMEKGEIKNCSFNI | |
| STSIRGKVQKEYAFFYKLDIIPIDNDTTSYTLTSCNTSVITQAC | |
| PKVSFEPIPIHYCAPAGFAILKCNNKTFNGTGPCTNVSTVQCT | |
| HGIRPVVSTQLLLNGSLAEEEVVIRSANFTDNAKTIIVQLNQS | |
| VEINCTRPNNNTRKSIRIQRGPGRAFVTIGKIGNMRQAHCNIS | |
| RAKWNNTLKQIDSKLREQFGNNKTIIFKQSSGGDPEIVTHSFN | |
| CGGEFFYCNSTQLFNSTWFNSTWSTKGSNNTEGSDTITLPCRI | |
| KQIINMWQEVGKAMYAPPISGQIRCSSNITGLLLTRDGGNSN | |
| NESEIFRPGGGDMRDNWRSELYKYKVVKIEPLGVAPTKAKR | |
| RVVQREKRAVGIGALFLGFLGAAGSTMGAASMTLTVQARQL | |
| LSGIVQQQNNLLRAIEAQQHLLQLTVWGIKQLQARILAVERR | |
| LKDQQLLGIWGCSGKLICTTAVPWNASWSNKSLEQIWNNM | |
| TWMEWDREINNYTSLIHSLIEESQNQQEKNEQELLELDKWAS | |
| LWNWFNITNWLWYIKLFIMIVGGLVGLRIVFAVLSVVNRVR | |
| QGYSPLSFQTHLPIPRGPDRPEGIEEEGGERDRDRSIRLVNGSL | |
| ALIWDDLRSLCLFSYHRLRDLLLIVTRIVELLGRRGWEALKY | |
| WWNLLQYWSQELKNSAVSLLNATAIAVAEGTDRVIEVVQG | |
| AYRAIRHIPRRIRQGLERILL | |
| MRVKEKYQHLWRWGWRWGTMLLGMLMICSATEKLWVTV | SEQ ID |
| YYGVPVWKEATTTLFCASDAKAYDTEVHNVWATHACVPTD | NO: |
| PNPQEVVLVNVTENFNMWKNDMVEQMHEDIISLWDQSLKP | 246 |
| CVKLTPLCVSLKCTDLKNDTNTNSSSGRMIMEKGEIKNCSFNI | |
| STSIRGKVQKEYAFFYKLDIIPIDNDTTSYTLTSCNTSVITQAC | |
| PKVSFEPIPIHYCAPAGFAILKCNNKTFNGTGPCTNVSTVQCT | |
| HGIRPVVSTQLLLNGSLAEEEVVIRSANFTDNAKTIIVQLNQS | |
| VEINCTRPNNNTRKSIRIQRGPGRAFVTIGKIGNMRQAHCNIS | |
| RAKWNNTLKQIDSKLREQFGNNKTIIFKQSSGGDPEIVTHSFN | |
| CGGEFFYCNSTQLFNSTWFNSTWSTKGSNNTEGSDTITLPCRI | |
| KQIINMWQEVGKAMYAPPISGQIRCSSNITGLLLTRDGGNSN | |
| NESEIFRPGGGDMRDNWRSELYKYKVVKIEPLGVAPTKAKR | |
| RVVQREKRAVGIGALFLGFLGAAGSTMGAASMTLTVQARQL | |
| LSGIVQQQNNLLRAIEAQQHLLQLTVWGIKQLQARILAVERY | |
| AKDQQLLGIWGCSGKLICTTAVPWNASWSNKSLEQIWNNM | |
| TWMEWDREINNYTSLIHSLIEESQNQQEKNEQELLELDKWAS | |
| LWNWFNITNWLWYIKLFIMIVGGLVGLRIVFAVLSVVNRVR | |
| QGYSPLSFQTHLPIPRGPDRPEGIEEEGGERDRDRSIRLVNGSL | |
| ALIWDDLRSLCLFSYHRLRDLLLIVTRIVELLGRRGWEALKY | |
| WWNLLQYWSQELKNSAVSLLNATAIAVAEGTDRVIEVVQG | |
| AYRAIRHIPRRIRQGLERILL | |
| MRVKEKYQHLWRWGWRWGTMLLGMLMICSATEKLWVTV | SEQ |
| YYGVPVWKEATTTLFCASDAKAYDTEVHNVWATHACVPTD | ID NO: |
| PNPQEVVLVNVTENFNMWKNDMVEQMHEDIISLWDQSLKP | 247 |
| CVKLTPLCVSLKCTDLKNDTNTNSSSGRMIMEKGEIKNCSFNI | |
| STSIRGKVQKEYAFFYKLDIIPIDNDTTSYTLTSCNTSVITQAC | |
| PKVSFEPIPIHYCAPAGFAILKCNNKTFNGTGPCTNVSTVQCT | |
| HGIRPVVSTQLLLNGSLAEEEVVIRSANFTDNAKTIIVQLNQS | |
| VEINCTRPNNNTRKSIRIQRGPGRAFVTIGKIGNMRQAHCNIS | |
| RAKWNNTLKQIDSKLREQFGNNKTIIFKQSSGGDPEIVTHSFN | |
| CGGEFFYCNSTQLFNSTWFNSTWSTKGSNNTEGSDTITLPCRI | |
| KQIINMWQEVGKAMYAPPISGQIRCSSNITGLLLTRDGGNSN | |
| NESEIFRPGGGDMRDNWRSELYKYKVVKIEPLGVAPTKAKR | |
| RVVQREKRAVGIGALFLGFLGAAGSTMGAASMTLTVQARQL | |
| LSGIVQQQNNLLRAIEAQQHLLQLTVWGIKQLQARILAVERY | |
| FKDQQLLGIWGCSGKLICTTAVPWNASWSNKSLEQIWNNMT | |
| WMEWDREINNYTSLIHSLIEESQNQQEKNEQELLELDKWASL | |
| WNWFNITNWLWYIKLFIMIVGGLVGLRIVFAVLSVVNRVRQ | |
| GYSPLSFQTHLPIPRGPDRPEGIEEEGGERDRDRSIRLVNGSLA | |
| LIWDDLRSLCLFSYHRLRDLLLIVTRIVELLGRRGWEALKYW | |
| WNLLQYWSQELKNSAVSLLNATAIAVAEGTDRVIEVVQGAY | |
| RAIRHIPRRIRQGLERILL | |
| MRVKEKYQHLWRWGWRWGTMLLGMLMICSATEKLWVTV | SEQ |
| YYGVPVWKEATTTLFCASDAKAYDTEVHNVWATHACVPTD | ID NO: |
| PNPQEVVLVNVTENFNMWKNDMVEQMHEDIISLWDQSLKP | 248 |
| CVKLTPLCVSLKCTDLKNDTNTNSSSGRMIMEKGEIKNCSFNI | |
| STSIRGKVQKEYAFFYKLDIIPIDNDTTSYTLTSCNTSVITQAC | |
| PKVSFEPIPIHYCAPAGFAILKCNNKTFNGTGPCTNVSTVQCT | |
| HGIRPVVSTQLLLNGSLAEEEVVIRSANFTDNAKTIIVQLNQS | |
| VEINCTRPNNNTRKSIRIQRGPGRAFVTIGKIGNMRQAHCNIS | |
| RAKWNNTLKQIDSKLREQFGNNKTIIFKQSSGGDPEIVTHSFN | |
| CGGEFFYCNSTQLFNSTWFNSTWSTKGSNNTEGSDTITLPCRI | |
| KQIINMWQEVGKAMYAPPISGQIRCSSNITGLLLTRDGGNSN | |
| NESEIFRPGGGDMRDNWRSELYKYKVVKIEPLGVAPTKAKR | |
| RVVQREKRAVGIGALFLGFLGAAGSTMGAASMTLTVQARQL | |
| LSGIVQQQNNLLRAIEAQQHLLQLTVWGIKQLQARILAVERY | |
| GKDQQLLGIWGCSGKLICTTAVPWNASWSNKSLEQIWNNM | |
| TWMEWDREINNYTSLIHSLIEESQNQQEKNEQELLELDKWAS | |
| LWNWFNITNWLWYIKLFIMIVGGLVGLRIVFAVLSVVNRVR | |
| QGYSPLSFQTHLPIPRGPDRPEGIEEEGGERDRDRSIRLVNGSL | |
| ALIWDDLRSLCLFSYHRLRDLLLIVTRIVELLGRRGWEALKY | |
| WWNLLQYWSQELKNSAVSLLNATAIAVAEGTDRVIEVVQG | |
| AYRAIRHIPRRIRQGLERILL | |
| MRVKEKYQHLWRWGWRWGTMLLGMLMICSATEKLWVTV | SEQ |
| YYGVPVWKEATTTLFCASDAKAYDTEVHNVWATHACVPTD | ID NO: |
| PNPQEVVLVNVTENFNMWKNDMVEQMHEDIISLWDQSLKP | 249 |
| CVKLTPLCVSLKCTDLKNDTNTNSSSGRMIMEKGEIKNCSFNI | |
| STSIRGKVQKEYAFFYKLDIIPIDNDTTSYTLTSCNTSVITQAC | |
| PKVSFEPIPIHYCAPAGFAILKCNNKTFNGTGPCTNVSTVQCT | |
| HGIRPVVSTQLLLNGSLAEEEVVIRSANFTDNAKTIIVQLNQS | |
| VEINCTRPNNNTRKSIRIQRGPGRAFVTIGKIGNMRQAHCNIS | |
| RAKWNNTLKQIDSKLREQFGNNKTIIFKQSSGGDPEIVTHSFN | |
| CGGEFFYCNSTQLFNSTWFNSTWSTKGSNNTEGSDTITLPCRI | |
| KQIINMWQEVGKAMYAPPISGQIRCSSNITGLLLTRDGGNSN | |
| NESEIFRPGGGDMRDNWRSELYKYKVVKIEPLGVAPTKAKR | |
| RVVQREKRAVGIGALFLGFLGAAGSTMGAASMTLTVQARQL | |
| LSGIVQQQNNLLRAIEAQQHLLQLTVWGIKQLQARILAVERY | |
| RKDQQLLGIWGCSGKLICTTAVPWNASWSNKSLEQIWNNM | |
| TWMEWDREINNYTSLIHSLIEESQNQQEKNEQELLELDKWAS | |
| LWNWFNITNWLWYIKLFIMIVGGLVGLRIVFAVLSVVNRVR | |
| QGYSPLSFQTHLPIPRGPDRPEGIEEEGGERDRDRSIRLVNGSL | |
| ALIWDDLRSLCLFSYHRLRDLLLIVTRIVELLGRRGWEALKY | |
| WWNLLQYWSQELKNSAVSLLNATAIAVAEGTDRVIEVVQG | |
| AYRAIRHIPRRIRQGLERILL | |
| MRVKEKYQHLWRWGWRWGTMLLGMLMICSATEKLWVTV | SEQ |
| YYGVPVWKEATTTLFCASDAKAYDTEVHNVWATHACVPTD | ID NO: |
| PNPQEVVLVNVTENFNMWKNDMVEQMHEDIISLWDQSLKP | 250 |
| CVKLTPLCVSLKCTDLKNDTNTNSSSGRMIMEKGEIKNCSFNI | |
| STSIRGKVQKEYAFFYKLDIIPIDNDTTSYTLTSCNTSVITQAC | |
| PKVSFEPIPIHYCAPAGFAILKCNNKTFNGTGPCTNVSTVQCT | |
| HGIRPVVSTQLLLNGSLAEEEVVIRSANFTDNAKTIIVQLNQS | |
| VEINCTRPNNNTRKSIRIQRGPGRAFVTIGKIGNMRQAHCNIS | |
| RAKWNNTLKQIDSKLREQFGNNKTIIFKQSSGGDPEIVTHSFN | |
| CGGEFFYCNSTQLFNSTWFNSTWSTKGSNNTEGSDTITLPCRI | |
| KQIINMWQEVGKAMYAPPISGQIRCSSNITGLLLTRDGGNSN | |
| NESEIFRPGGGDMRDNWRSELYKYKVVKIEPLGVAPTKAKR | |
| RVVQREKRAVGIGALFLGFLGAAGSTMGAASMTLTVQARQL | |
| LSGIVQQQNNLLRAIEAQQHLLQLTVWGIKQLQARILAVERA | |
| AKDQQLLGIWGCSGKLICTTAVPWNASWSNKSLEQIWNNM | |
| TWMEWDREINNYTSLIHSLIEESQNQQEKNEQELLELDKWAS | |
| LWNWFNITNWLWYIKLFIMIVGGLVGLRIVFAVLSVVNRVR | |
| QGYSPLSFQTHLPIPRGPDRPEGIEEEGGERDRDRSIRLVNGSL | |
| ALIWDDLRSLCLFSYHRLRDLLLIVTRIVELLGRRGWEALKY | |
| WWNLLQYWSQELKNSAVSLLNATAIAVAEGTDRVIEVVQG | |
| AYRAIRHIPRRIRQGLERILL | |
| MRVKEKYQHLWRWGWRWGTMLLGMLMICSATEKLWVTV | SEQ |
| YYGVPVWKEATTTLFCASDAKAYDTEVHNVWATHACVPTD | ID NO: |
| PNPQEVVLVNVTENFNMWKNDMVEQMHEDIISLWDQSLKP | 251 |
| CVKLTPLCVSLKCTDLKNDTNTNSSSGRMIMEKGEIKNCSFNI | |
| STSIRGKVQKEYAFFYKLDIIPIDNDTTSYTLTSCNTSVITQAC | |
| PKVSFEPIPIHYCAPAGFAILKCNNKTFNGTGPCTNVSTVQCT | |
| HGIRPVVSTQLLLNGSLAEEEVVIRSANFTDNAKTIIVQLNQS | |
| VEINCTRPNNNTRKSIRIQRGPGRAFVTIGKIGNMRQAHCNIS | |
| RAKWNNTLKQIDSKLREQFGNNKTIIFKQSSGGDPEIVTHSFN | |
| CGGEFFYCNSTQLFNSTWFNSTWSTKGSNNTEGSDTITLPCRI | |
| KQIINMWQEVGKAMYAPPISGQIRCSSNITGLLLTRDGGNSN | |
| NESEIFRPGGGDMRDNWRSELYKYKVVKIEPLGVAPTKAKR | |
| RVVQREKRAVGIGALFLGFLGAAGSTMGAASMTLTVQARQL | |
| LSGIVQQQNNLLRAIEAQQHLLQLTVWGIKQLQARILAVERA | |
| FKDQQLLGIWGCSGKLICTTAVPWNASWSNKSLEQIWNNMT | |
| WMEWDREINNYTSLIHSLIEESQNQQEKNEQELLELDKWASL | |
| WNWFNITNWLWYIKLFIMIVGGLVGLRIVFAVLSVVNRVRQ | |
| GYSPLSFQTHLPIPRGPDRPEGIEEEGGERDRDRSIRLVNGSLA | |
| LIWDDLRSLCLFSYHRLRDLLLIVTRIVELLGRRGWEALKYW | |
| WNLLQYWSQELKNSAVSLLNATAIAVAEGTDRVIEVVQGAY | |
| RAIRHIPRRIRQGLERILL | |
| MRVKEKYQHLWRWGWRWGTMLLGMLMICSATEKLWVTV | SEQ |
| YYGVPVWKEATTTLFCASDAKAYDTEVHNVWATHACVPTD | ID NO: |
| PNPQEVVLVNVTENFNMWKNDMVEQMHEDIISLWDQSLKP | 252 |
| CVKLTPLCVSLKCTDLKNDTNTNSSSGRMIMEKGEIKNCSFNI | |
| STSIRGKVQKEYAFFYKLDIIPIDNDTTSYTLTSCNTSVITQAC | |
| PKVSFEPIPIHYCAPAGFAILKCNNKTFNGTGPCTNVSTVQCT | |
| HGIRPVVSTQLLLNGSLAEEEVVIRSANFTDNAKTIIVQLNQS | |
| VEINCTRPNNNTRKSIRIQRGPGRAFVTIGKIGNMRQAHCNIS | |
| RAKWNNTLKQIDSKLREQFGNNKTIIFKQSSGGDPEIVTHSFN | |
| CGGEFFYCNSTQLFNSTWFNSTWSTKGSNNTEGSDTITLPCRI | |
| KQIINMWQEVGKAMYAPPISGQIRCSSNITGLLLTRDGGNSN | |
| NESEIFRPGGGDMRDNWRSELYKYKVVKIEPLGVAPTKAKR | |
| RVVQREKRAVGIGALFLGFLGAAGSTMGAASMTLTVQARQL | |
| LSGIVQQQNNLLRAIEAQQHLLQLTVWGIKQLQARILAVERA | |
| GKDQQLLGIWGCSGKLICTTAVPWNASWSNKSLEQIWNNM | |
| TWMEWDREINNYTSLIHSLIEESQNQQEKNEQELLELDKWAS | |
| LWNWFNITNWLWYIKLFIMIVGGLVGLRIVFAVLSVVNRVR | |
| QGYSPLSFQTHLPIPRGPDRPEGIEEEGGERDRDRSIRLVNGSL | |
| ALIWDDLRSLCLFSYHRLRDLLLIVTRIVELLGRRGWEALKY | |
| WWNLLQYWSQELKNSAVSLLNATAIAVAEGTDRVIEVVQG | |
| AYRAIRHIPRRIRQGLERILL | |
| MRVKEKYQHLWRWGWRWGTMLLGMLMICSATEKLWVTV | SEQ |
| YYGVPVWKEATTTLFCASDAKAYDTEVHNVWATHACVPTD | ID NO: |
| PNPQEVVLVNVTENFNMWKNDMVEQMHEDIISLWDQSLKP | 253 |
| CVKLTPLCVSLKCTDLKNDTNTNSSSGRMIMEKGEIKNCSFNI | |
| STSIRGKVQKEYAFFYKLDIIPIDNDTTSYTLTSCNTSVITQAC | |
| PKVSFEPIPIHYCAPAGFAILKCNNKTFNGTGPCTNVSTVQCT | |
| HGIRPVVSTQLLLNGSLAEEEVVIRSANFTDNAKTIIVQLNQS | |
| VEINCTRPNNNTRKSIRIQRGPGRAFVTIGKIGNMRQAHCNIS | |
| RAKWNNTLKQIDSKLREQFGNNKTIIFKQSSGGDPEIVTHSFN | |
| CGGEFFYCNSTQLFNSTWFNSTWSTKGSNNTEGSDTITLPCRI | |
| KQIINMWQEVGKAMYAPPISGQIRCSSNITGLLLTRDGGNSN | |
| NESEIFRPGGGDMRDNWRSELYKYKVVKIEPLGVAPTKAKR | |
| RVVQREKRAVGIGALFLGFLGAAGSTMGAASMTLTVQARQL | |
| LSGIVQQQNNLLRAIEAQQHLLQLTVWGIKQLQARILAVERA | |
| RKDQQLLGIWGCSGKLICTTAVPWNASWSNKSLEQIWNNM | |
| TWMEWDREINNYTSLIHSLIEESQNQQEKNEQELLELDKWAS | |
| LWNWFNITNWLWYIKLFIMIVGGLVGLRIVFAVLSVVNRVR | |
| QGYSPLSFQTHLPIPRGPDRPEGIEEEGGERDRDRSIRLVNGSL | |
| ALIWDDLRSLCLFSYHRLRDLLLIVTRIVELLGRRGWEALKY | |
| WWNLLQYWSQELKNSAVSLLNATAIAVAEGTDRVIEVVQG | |
| AYRAIRHIPRRIRQGLERILL | |
| MRVKEKYQHLWRWGWRWGTMLLGMLMICSATEKLWVTV | SEQ |
| YYGVPVWKEATTTLFCASDAKAYDTEVHNVWATHACVPTD | ID NO: |
| PNPQEVVLVNVTENFNMWKNDMVEQMHEDIISLWDQSLKP | 254 |
| CVKLTPLCVSLKCTDLKNDTNTNSSSGRMIMEKGEIKNCSFNI | |
| STSIRGKVQKEYAFFYKLDIIPIDNDTTSYTLTSCNTSVITQAC | |
| PKVSFEPIPIHYCAPAGFAILKCNNKTFNGTGPCTNVSTVQCT | |
| HGIRPVVSTQLLLNGSLAEEEVVIRSANFTDNAKTIIVQLNQS | |
| VEINCTRPNNNTRKSIRIQRGPGRAFVTIGKIGNMRQAHCNIS | |
| RAKWNNTLKQIDSKLREQFGNNKTIIFKQSSGGDPEIVTHSFN | |
| CGGEFFYCNSTQLFNSTWFNSTWSTKGSNNTEGSDTITLPCRI | |
| KQIINMWQEVGKAMYAPPISGQIRCSSNITGLLLTRDGGNSN | |
| NESEIFRPGGGDMRDNWRSELYKYKVVKIEPLGVAPTKAKR | |
| RVVQREKRAVGIGALFLGFLGAAGSTMGAASMTLTVQARQL | |
| LSGIVQQQNNLLRAIEAQQHLLQLTVWGIKQLQARILAVERF | |
| AKDQQLLGIWGCSGKLICTTAVPWNASWSNKSLEQIWNNM | |
| TWMEWDREINNYTSLIHSLIEESQNQQEKNEQELLELDKWAS | |
| LWNWFNITNWLWYIKLFIMIVGGLVGLRIVFAVLSVVNRVR | |
| QGYSPLSFQTHLPIPRGPDRPEGIEEEGGERDRDRSIRLVNGSL | |
| ALIWDDLRSLCLFSYHRLRDLLLIVTRIVELLGRRGWEALKY | |
| WWNLLQYWSQELKNSAVSLLNATAIAVAEGTDRVIEVVQG | |
| AYRAIRHIPRRIRQGLERILL | |
| MRVKEKYQHLWRWGWRWGTMLLGMLMICSATEKLWVTV | SEQ |
| YYGVPVWKEATTTLFCASDAKAYDTEVHNVWATHACVPTD | ID NO: |
| PNPQEVVLVNVTENFNMWKNDMVEQMHEDIISLWDQSLKP | 255 |
| CVKLTPLCVSLKCTDLKNDTNTNSSSGRMIMEKGEIKNCSFNI | |
| STSIRGKVQKEYAFFYKLDIIPIDNDTTSYTLTSCNTSVITQAC | |
| PKVSFEPIPIHYCAPAGFAILKCNNKTFNGTGPCTNVSTVQCT | |
| HGIRPVVSTQLLLNGSLAEEEVVIRSANFTDNAKTIIVQLNQS | |
| VEINCTRPNNNTRKSIRIQRGPGRAFVTIGKIGNMRQAHCNIS | |
| RAKWNNTLKQIDSKLREQFGNNKTIIFKQSSGGDPEIVTHSFN | |
| CGGEFFYCNSTQLFNSTWFNSTWSTKGSNNTEGSDTITLPCRI | |
| KQIINMWQEVGKAMYAPPISGQIRCSSNITGLLLTRDGGNSN | |
| NESEIFRPGGGDMRDNWRSELYKYKVVKIEPLGVAPTKAKR | |
| RVVQREKRAVGIGALFLGFLGAAGSTMGAASMTLTVQARQL | |
| LSGIVQQQNNLLRAIEAQQHLLQLTVWGIKQLQARILAVERF | |
| FKDQQLLGIWGCSGKLICTTAVPWNASWSNKSLEQIWNNMT | |
| WMEWDREINNYTSLIHSLIEESQNQQEKNEQELLELDKWASL | |
| WNWFNITNWLWYIKLFIMIVGGLVGLRIVFAVLSVVNRVRQ | |
| GYSPLSFQTHLPIPRGPDRPEGIEEEGGERDRDRSIRLVNGSLA | |
| LIWDDLRSLCLFSYHRLRDLLLIVTRIVELLGRRGWEALKYW | |
| WNLLQYWSQELKNSAVSLLNATAIAVAEGTDRVIEVVQGAY | |
| RAIRHIPRRIRQGLERILL | |
| MRVKEKYQHLWRWGWRWGTMLLGMLMICSATEKLWVTV | SEQ |
| YYGVPVWKEATTTLFCASDAKAYDTEVHNVWATHACVPTD | ID NO: |
| PNPQEVVLVNVTENFNMWKNDMVEQMHEDIISLWDQSLKP | 256 |
| CVKLTPLCVSLKCTDLKNDTNTNSSSGRMIMEKGEIKNCSFNI | |
| STSIRGKVQKEYAFFYKLDIIPIDNDTTSYTLTSCNTSVITQAC | |
| PKVSFEPIPIHYCAPAGFAILKCNNKTFNGTGPCTNVSTVQCT | |
| HGIRPVVSTQLLLNGSLAEEEVVIRSANFTDNAKTIIVQLNQS | |
| VEINCTRPNNNTRKSIRIQRGPGRAFVTIGKIGNMRQAHCNIS | |
| RAKWNNTLKQIDSKLREQFGNNKTIIFKQSSGGDPEIVTHSFN | |
| CGGEFFYCNSTQLFNSTWFNSTWSTKGSNNTEGSDTITLPCRI | |
| KQIINMWQEVGKAMYAPPISGQIRCSSNITGLLLTRDGGNSN | |
| NESEIFRPGGGDMRDNWRSELYKYKVVKIEPLGVAPTKAKR | |
| RVVQREKRAVGIGALFLGFLGAAGSTMGAASMTLTVQARQL | |
| LSGIVQQQNNLLRAIEAQQHLLQLTVWGIKQLQARILAVERF | |
| GKDQQLLGIWGCSGKLICTTAVPWNASWSNKSLEQIWNNM | |
| TWMEWDREINNYTSLIHSLIEESQNQQEKNEQELLELDKWAS | |
| LWNWFNITNWLWYIKLFIMIVGGLVGLRIVFAVLSVVNRVR | |
| QGYSPLSFQTHLPIPRGPDRPEGIEEEGGERDRDRSIRLVNGSL | |
| ALIWDDLRSLCLFSYHRLRDLLLIVTRIVELLGRRGWEALKY | |
| WWNLLQYWSQELKNSAVSLLNATAIAVAEGTDRVIEVVQG | |
| AYRAIRHIPRRIRQGLERILL | |
| MRVKEKYQHLWRWGWRWGTMLLGMLMICSATEKLWVTV | SEQ |
| YYGVPVWKEATTTLFCASDAKAYDTEVHNVWATHACVPTD | ID NO: |
| PNPQEVVLVNVTENFNMWKNDMVEQMHEDIISLWDQSLKP | 257 |
| CVKLTPLCVSLKCTDLKNDTNTNSSSGRMIMEKGEIKNCSFNI | |
| STSIRGKVQKEYAFFYKLDIIPIDNDTTSYTLTSCNTSVITQAC | |
| PKVSFEPIPIHYCAPAGFAILKCNNKTFNGTGPCTNVSTVQCT | |
| HGIRPVVSTQLLLNGSLAEEEVVIRSANFTDNAKTIIVQLNQS | |
| VEINCTRPNNNTRKSIRIQRGPGRAFVTIGKIGNMRQAHCNIS | |
| RAKWNNTLKQIDSKLREQFGNNKTIIFKQSSGGDPEIVTHSFN | |
| CGGEFFYCNSTQLFNSTWFNSTWSTKGSNNTEGSDTITLPCRI | |
| KQIINMWQEVGKAMYAPPISGQIRCSSNITGLLLTRDGGNSN | |
| NESEIFRPGGGDMRDNWRSELYKYKVVKIEPLGVAPTKAKR | |
| RVVQREKRAVGIGALFLGFLGAAGSTMGAASMTLTVQARQL | |
| LSGIVQQQNNLLRAIEAQQHLLQLTVWGIKQLQARILAVERF | |
| RKDQQLLGIWGCSGKLICTTAVPWNASWSNKSLEQIWNNM | |
| TWMEWDREINNYTSLIHSLIEESQNQQEKNEQELLELDKWAS | |
| LWNWFNITNWLWYIKLFIMIVGGLVGLRIVFAVLSVVNRVR | |
| QGYSPLSFQTHLPIPRGPDRPEGIEEEGGERDRDRSIRLVNGSL | |
| ALIWDDLRSLCLFSYHRLRDLLLIVTRIVELLGRRGWEALKY | |
| WWNLLQYWSQELKNSAVSLLNATAIAVAEGTDRVIEVVQG | |
| AYRAIRHIPRRIRQGLERILL | |
| WWNLLQYWSQELKNSAVSLLNATAIAVAEGTDRVIEVVQG | |
| AYRAIRHIPRRIRQGLERILL | |
| MRVKEKYQHLWRWGWRWGTMLLGMLMICSATEKLWVTV | SEQ |
| YYGVPVWKEATTTLFCASDAKAYDTEVHNVWATHACVPTD | ID NO: |
| PNPQEVVLVNVTENFNMWKNDMVEQMHEDIISLWDQSLKP | 258 |
| CVKLTPLCVSLKCTDLKNDTNTNSSSGRMIMEKGEIKNCSFNI | |
| STSIRGKVQKEYAFFYKLDIIPIDNDTTSYTLTSCNTSVITQAC | |
| PKVSFEPIPIHYCAPAGFAILKCNNKTFNGTGPCTNVSTVQCT | |
| HGIRPVVSTQLLLNGSLAEEEVVIRSANFTDNAKTIIVQLNQS | |
| VEINCTRPNNNTRKSIRIQRGPGRAFVTIGKIGNMRQAHCNIS | |
| RAKWNNTLKQIDSKLREQFGNNKTIIFKQSSGGDPEIVTHSFN | |
| CGGEFFYCNSTQLFNSTWFNSTWSTKGSNNTEGSDTITLPCRI | |
| KQIINMWQEVGKAMYAPPISGQIRCSSNITGLLLTRDGGNSN | |
| NESEIFRPGGGDMRDNWRSELYKYKVVKIEPLGVAPTKAKR | |
| RVVQREKRAVGIGALFLGFLGAAGSTMGAASMTLTVQARQL | |
| LSGIVQQQNNLLRAIEAQQHLLQLTVWGIKQLQARILAVERG | |
| AKDQQLLGIWGCSGKLICTTAVPWNASWSNKSLEQIWNNM | |
| TWMEWDREINNYTSLIHSLIEESQNQQEKNEQELLELDKWAS | |
| LWNWFNITNWLWYIKLFIMIVGGLVGLRIVFAVLSVVNRVR | |
| QGYSPLSFQTHLPIPRGPDRPEGIEEEGGERDRDRSIRLVNGSL | |
| ALIWDDLRSLCLFSYHRLRDLLLIVTRIVELLGRRGWEALKY | |
| WWNLLQYWSQELKNSAVSLLNATAIAVAEGTDRVIEVVQG | |
| AYRAIRHIPRRIRQGLERILL | |
| MRVKEKYQHLWRWGWRWGTMLLGMLMICSATEKLWVTV | SEQ |
| YYGVPVWKEATTTLFCASDAKAYDTEVHNVWATHACVPTD | ID NO: |
| PNPQEVVLVNVTENFNMWKNDMVEQMHEDIISLWDQSLKP | 259 |
| CVKLTPLCVSLKCTDLKNDTNTNSSSGRMIMEKGEIKNCSFNI | |
| STSIRGKVQKEYAFFYKLDIIPIDNDTTSYTLTSCNTSVITQAC | |
| PKVSFEPIPIHYCAPAGFAILKCNNKTFNGTGPCTNVSTVQCT | |
| HGIRPVVSTQLLLNGSLAEEEVVIRSANFTDNAKTIIVQLNQS | |
| VEINCTRPNNNTRKSIRIQRGPGRAFVTIGKIGNMRQAHCNIS | |
| RAKWNNTLKQIDSKLREQFGNNKTIIFKQSSGGDPEIVTHSFN | |
| CGGEFFYCNSTQLFNSTWFNSTWSTKGSNNTEGSDTITLPCRI | |
| KQIINMWQEVGKAMYAPPISGQIRCSSNITGLLLTRDGGNSN | |
| NESEIFRPGGGDMRDNWRSELYKYKVVKIEPLGVAPTKAKR | |
| RVVQREKRAVGIGALFLGFLGAAGSTMGAASMTLTVQARQL | |
| LSGIVQQQNNLLRAIEAQQHLLQLTVWGIKQLQARILAVERG | |
| FKDQQLLGIWGCSGKLICTTAVPWNASWSNKSLEQIWNNMT | |
| WMEWDREINNYTSLIHSLIEESQNQQEKNEQELLELDKWASL | |
| WNWFNITNWLWYIKLFIMIVGGLVGLRIVFAVLSVVNRVRQ | |
| GYSPLSFQTHLPIPRGPDRPEGIEEEGGERDRDRSIRLVNGSLA | |
| LIWDDLRSLCLFSYHRLRDLLLIVTRIVELLGRRGWEALKYW | |
| WNLLQYWSQELKNSAVSLLNATAIAVAEGTDRVIEVVQGAY | |
| RAIRHIPRRIRQGLERILL | |
| MRVKEKYQHLWRWGWRWGTMLLGMLMICSATEKLWVTV | SEQ |
| YYGVPVWKEATTTLFCASDAKAYDTEVHNVWATHACVPTD | ID NO: |
| PNPQEVVLVNVTENFNMWKNDMVEQMHEDIISLWDQSLKP | 260 |
| CVKLTPLCVSLKCTDLKNDTNTNSSSGRMIMEKGEIKNCSFNI | |
| STSIRGKVQKEYAFFYKLDIIPIDNDTTSYTLTSCNTSVITQAC | |
| PKVSFEPIPIHYCAPAGFAILKCNNKTFNGTGPCTNVSTVQCT | |
| HGIRPVVSTQLLLNGSLAEEEVVIRSANFTDNAKTIIVQLNQS | |
| VEINCTRPNNNTRKSIRIQRGPGRAFVTIGKIGNMRQAHCNIS | |
| RAKWNNTLKQIDSKLREQFGNNKTIIFKQSSGGDPEIVTHSFN | |
| CGGEFFYCNSTQLFNSTWFNSTWSTKGSNNTEGSDTITLPCRI | |
| KQIINMWQEVGKAMYAPPISGQIRCSSNITGLLLTRDGGNSN | |
| NESEIFRPGGGDMRDNWRSELYKYKVVKIEPLGVAPTKAKR | |
| RVVQREKRAVGIGALFLGFLGAAGSTMGAASMTLTVQARQL | |
| LSGIVQQQNNLLRAIEAQQHLLQLTVWGIKQLQARILAVERG | |
| GKDQQLLGIWGCSGKLICTTAVPWNASWSNKSLEQIWNNM | |
| TWMEWDREINNYTSLIHSLIEESQNQQEKNEQELLELDKWAS | |
| LWNWFNITNWLWYIKLFIMIVGGLVGLRIVFAVLSVVNRVR | |
| QGYSPLSFQTHLPIPRGPDRPEGIEEEGGERDRDRSIRLVNGSL | |
| ALIWDDLRSLCLFSYHRLRDLLLIVTRIVELLGRRGWEALKY | |
| WWNLLQYWSQELKNSAVSLLNATAIAVAEGTDRVIEVVQG | |
| AYRAIRHIPRRIRQGLERILL | |
| MRVKEKYQHLWRWGWRWGTMLLGMLMICSATEKLWVTV | SEQ |
| YYGVPVWKEATTTLFCASDAKAYDTEVHNVWATHACVPTD | ID NO: |
| PNPQEVVLVNVTENFNMWKNDMVEQMHEDIISLWDQSLKP | 261 |
| CVKLTPLCVSLKCTDLKNDTNTNSSSGRMIMEKGEIKNCSFNI | |
| STSIRGKVQKEYAFFYKLDIIPIDNDTTSYTLTSCNTSVITQAC | |
| PKVSFEPIPIHYCAPAGFAILKCNNKTFNGTGPCTNVSTVQCT | |
| HGIRPVVSTQLLLNGSLAEEEVVIRSANFTDNAKTIIVQLNQS | |
| VEINCTRPNNNTRKSIRIQRGPGRAFVTIGKIGNMRQAHCNIS | |
| RAKWNNTLKQIDSKLREQFGNNKTIIFKQSSGGDPEIVTHSFN | |
| CGGEFFYCNSTQLFNSTWFNSTWSTKGSNNTEGSDTITLPCRI | |
| KQIINMWQEVGKAMYAPPISGQIRCSSNITGLLLTRDGGNSN | |
| NESEIFRPGGGDMRDNWRSELYKYKVVKIEPLGVAPTKAKR | |
| RVVQREKRAVGIGALFLGFLGAAGSTMGAASMTLTVQARQL | |
| LSGIVQQQNNLLRAIEAQQHLLQLTVWGIKQLQARILAVERG | |
| RKDQQLLGIWGCSGKLICTTAVPWNASWSNKSLEQIWNNM | |
| TWMEWDREINNYTSLIHSLIEESQNQQEKNEQELLELDKWAS | |
| LWNWFNITNWLWYIKLFIMIVGGLVGLRIVFAVLSVVNRVR | |
| QGYSPLSFQTHLPIPRGPDRPEGIEEEGGERDRDRSIRLVNGSL | |
| ALIWDDLRSLCLFSYHRLRDLLLIVTRIVELLGRRGWEALKY | |
| WWNLLQYWSQELKNSAVSLLNATAIAVAEGTDRVIEVVQG | |
| AYRAIRHIPRRIRQGLERILL | |
| MRVKEKYQHLWRWGWRWGTMLLGMLMICSATEKLWVTV | SEQ |
| YYGVPVWKEATTTLFCASDAKAYDTEVHNVWATHACVPTD | ID NO: |
| PNPQEVVLVNVTENFNMWKNDMVEQMHEDIISLWDQSLKP | 262 |
| CVKLTPLCVSLKCTDLKNDTNTNSSSGRMIMEKGEIKNCSFNI | |
| STSIRGKVQKEYAFFYKLDIIPIDNDTTSYTLTSCNTSVITQAC | |
| PKVSFEPIPIHYCAPAGFAILKCNNKTFNGTGPCTNVSTVQCT | |
| HGIRPVVSTQLLLNGSLAEEEVVIRSANFTDNAKTIIVQLNQS | |
| VEINCTRPNNNTRKSIRIQRGPGRAFVTIGKIGNMRQAHCNIS | |
| RAKWNNTLKQIDSKLREQFGNNKTIIFKQSSGGDPEIVTHSFN | |
| CGGEFFYCNSTQLFNSTWFNSTWSTKGSNNTEGSDTITLPCRI | |
| KQIINMWQEVGKAMYAPPISGQIRCSSNITGLLLTRDGGNSN | |
| NESEIFRPGGGDMRDNWRSELYKYKVVKIEPLGVAPTKAKR | |
| RVVQREKRAVGIGALFLGFLGAAGSTMGAASMTLTVQARQL | |
| LSGIVQQQNNLLRAIEAQQHLLQLTVWGIKQLQARILAVERL | |
| AKDQQLLGIWGCSGKLICTTAVPWNASWSNKSLEQIWNNM | |
| TWMEWDREINNYTSLIHSLIEESQNQQEKNEQELLELDKWAS | |
| LWNWFNITNWLWYIKLFIMIVGGLVGLRIVFAVLSVVNRVR | |
| QGYSPLSFQTHLPIPRGPDRPEGIEEEGGERDRDRSIRLVNGSL | |
| ALIWDDLRSLCLFSYHRLRDLLLIVTRIVELLGRRGWEALKY | |
| WWNLLQYWSQELKNSAVSLLNATAIAVAEGTDRVIEVVQG | |
| AYRAIRHIPRRIRQGLERILL | |
| MRVKEKYQHLWRWGWRWGTMLLGMLMICSATEKLWVTV | SEQ |
| YYGVPVWKEATTTLFCASDAKAYDTEVHNVWATHACVPTD | ID NO: |
| PNPQEVVLVNVTENFNMWKNDMVEQMHEDIISLWDQSLKP | 263 |
| CVKLTPLCVSLKCTDLKNDTNTNSSSGRMIMEKGEIKNCSFNI | |
| STSIRGKVQKEYAFFYKLDIIPIDNDTTSYTLTSCNTSVITQAC | |
| PKVSFEPIPIHYCAPAGFAILKCNNKTFNGTGPCTNVSTVQCT | |
| HGIRPVVSTQLLLNGSLAEEEVVIRSANFTDNAKTIIVQLNQS | |
| VEINCTRPNNNTRKSIRIQRGPGRAFVTIGKIGNMRQAHCNIS | |
| RAKWNNTLKQIDSKLREQFGNNKTIIFKQSSGGDPEIVTHSFN | |
| CGGEFFYCNSTQLFNSTWFNSTWSTKGSNNTEGSDTITLPCRI | |
| KQIINMWQEVGKAMYAPPISGQIRCSSNITGLLLTRDGGNSN | |
| NESEIFRPGGGDMRDNWRSELYKYKVVKIEPLGVAPTKAKR | |
| RVVQREKRAVGIGALFLGFLGAAGSTMGAASMTLTVQARQL | |
| LSGIVQQQNNLLRAIEAQQHLLQLTVWGIKQLQARILAVERL | |
| FKDQQLLGIWGCSGKLICTTAVPWNASWSNKSLEQIWNNMT | |
| WMEWDREINNYTSLIHSLIEESQNQQEKNEQELLELDKWASL | |
| WNWFNITNWLWYIKLFIMIVGGLVGLRIVFAVLSVVNRVRQ | |
| GYSPLSFQTHLPIPRGPDRPEGIEEEGGERDRDRSIRLVNGSLA | |
| LIWDDLRSLCLFSYHRLRDLLLIVTRIVELLGRRGWEALKYW | |
| WNLLQYWSQELKNSAVSLLNATAIAVAEGTDRVIEVVQGAY | |
| RAIRHIPRRIRQGLERILL | |
| MRVKEKYQHLWRWGWRWGTMLLGMLMICSATEKLWVTV | SEQ |
| YYGVPVWKEATTTLFCASDAKAYDTEVHNVWATHACVPTD | ID NO: |
| PNPQEVVLVNVTENFNMWKNDMVEQMHEDIISLWDQSLKP | 264 |
| CVKLTPLCVSLKCTDLKNDTNTNSSSGRMIMEKGEIKNCSFNI | |
| STSIRGKVQKEYAFFYKLDIIPIDNDTTSYTLTSCNTSVITQAC | |
| PKVSFEPIPIHYCAPAGFAILKCNNKTFNGTGPCTNVSTVQCT | |
| HGIRPVVSTQLLLNGSLAEEEVVIRSANFTDNAKTIIVQLNQS | |
| VEINCTRPNNNTRKSIRIQRGPGRAFVTIGKIGNMRQAHCNIS | |
| RAKWNNTLKQIDSKLREQFGNNKTIIFKQSSGGDPEIVTHSFN | |
| CGGEFFYCNSTQLFNSTWFNSTWSTKGSNNTEGSDTITLPCRI | |
| KQIINMWQEVGKAMYAPPISGQIRCSSNITGLLLTRDGGNSN | |
| NESEIFRPGGGDMRDNWRSELYKYKVVKIEPLGVAPTKAKR | |
| RVVQREKRAVGIGALFLGFLGAAGSTMGAASMTLTVQARQL | |
| LSGIVQQQNNLLRAIEAQQHLLQLTVWGIKQLQARILAVERL | |
| GKDQQLLGIWGCSGKLICTTAVPWNASWSNKSLEQIWNNM | |
| TWMEWDREINNYTSLIHSLIEESQNQQEKNEQELLELDKWAS | |
| LWNWFNITNWLWYIKLFIMIVGGLVGLRIVFAVLSVVNRVR | |
| QGYSPLSFQTHLPIPRGPDRPEGIEEEGGERDRDRSIRLVNGSL | |
| ALIWDDLRSLCLFSYHRLRDLLLIVTRIVELLGRRGWEALKY | |
| WWNLLQYWSQELKNSAVSLLNATAIAVAEGTDRVIEVVQG | |
| AYRAIRHIPRRIRQGLERILL | |
| MRVKEKYQHLWRWGWRWGTMLLGMLMICSATEKLWVTV | SEQ |
| YYGVPVWKEATTTLFCASDAKAYDTEVHNVWATHACVPTD | ID NO: |
| PNPQEVVLVNVTENFNMWKNDMVEQMHEDIISLWDQSLKP | 265 |
| CVKLTPLCVSLKCTDLKNDTNTNSSSGRMIMEKGEIKNCSFNI | |
| STSIRGKVQKEYAFFYKLDIIPIDNDTTSYTLTSCNTSVITQAC | |
| PKVSFEPIPIHYCAPAGFAILKCNNKTFNGTGPCTNVSTVQCT | |
| HGIRPVVSTQLLLNGSLAEEEVVIRSANFTDNAKTIIVQLNQS | |
| VEINCTRPNNNTRKSIRIQRGPGRAFVTIGKIGNMRQAHCNIS | |
| RAKWNNTLKQIDSKLREQFGNNKTIIFKQSSGGDPEIVTHSFN | |
| CGGEFFYCNSTQLFNSTWFNSTWSTKGSNNTEGSDTITLPCRI | |
| KQIINMWQEVGKAMYAPPISGQIRCSSNITGLLLTRDGGNSN | |
| NESEIFRPGGGDMRDNWRSELYKYKVVKIEPLGVAPTKAKR | |
| RVVQREKRAVGIGALFLGFLGAAGSTMGAASMTLTVQARQL | |
| LSGIVQQQNNLLRAIEAQQHLLQLTVWGIKQLQARILAVERL | |
| RKDQQLLGIWGCSGKLICTTAVPWNASWSNKSLEQIWNNM | |
| TWMEWDREINNYTSLIHSLIEESQNQQEKNEQELLELDKWAS | |
| LWNWFNITNWLWYIKLFIMIVGGLVGLRIVFAVLSVVNRVR | |
| QGYSPLSFQTHLPIPRGPDRPEGIEEEGGERDRDRSIRLVNGSL | |
| ALIWDDLRSLCLFSYHRLRDLLLIVTRIVELLGRRGWEALKY | |
| WWNLLQYWSQELKNSAVSLLNATAIAVAEGTDRVIEVVQG | |
| AYRAIRHIPRRIRQGLERILL | |
| MRVKEKYQHLWRWGWRWGTMLLGMLMICSATEKLWVTV | SEQ |
| YYGVPVWKEATTTLFCASDAKAYDTEVHNVWATHACVPTD | ID NO: |
| PNPQEVVLVNVTENFNMWKNDMVEQMHEDIISLWDQSLKP | 266 |
| CVKLTPLCVSLKCTDLKNDTNTNSSSGRMIMEKGEIKNCSFNI | |
| STSIRGKVQKEYAFFYKLDIIPIDNDTTSYTLTSCNTSVITQAC | |
| PKVSFEPIPIHYCAPAGFAILKCNNKTFNGTGPCTNVSTVQCT | |
| HGIRPVVSTQLLLNGSLAEEEVVIRSANFTDNAKTIIVQLNQS | |
| VEINCTRPNNNTRKSIRIQRGPGRAFVTIGKIGNMRQAHCNIS | |
| RAKWNNTLKQIDSKLREQFGNNKTIIFKQSSGGDPEIVTHSFN | |
| CGGEFFYCNSTQLFNSTWFNSTWSTKGSNNTEGSDTITLPCRI | |
| KQIINMWQEVGKAMYAPPISGQIRCSSNITGLLLTRDGGNSN | |
| NESEIFRPGGGDMRDNWRSELYKYKVVKIEPLGVAPTKAKR | |
| RVVQREKRAVGIGALFLGFLGAAGSTMGAASMTLTVQARQL | |
| LSGIVQQQNNLLRAIEAQQHLLQLTVWGIKQLQARILAVERR | |
| AKDQQLLGIWGCSGKLICTTAVPWNASWSNKSLEQIWNNM | |
| TWMEWDREINNYTSLIHSLIEESQNQQEKNEQELLELDKWAS | |
| LWNWFNITNWLWYIKLFIMIVGGLVGLRIVFAVLSVVNRVR | |
| QGYSPLSFQTHLPIPRGPDRPEGIEEEGGERDRDRSIRLVNGSL | |
| ALIWDDLRSLCLFSYHRLRDLLLIVTRIVELLGRRGWEALKY | |
| WWNLLQYWSQELKNSAVSLLNATAIAVAEGTDRVIEVVQG | |
| AYRAIRHIPRRIRQGLERILL | |
| MRVKEKYQHLWRWGWRWGTMLLGMLMICSATEKLWVTV | SEQ |
| YYGVPVWKEATTTLFCASDAKAYDTEVHNVWATHACVPTD | ID NO: |
| PNPQEVVLVNVTENFNMWKNDMVEQMHEDIISLWDQSLKP | 267 |
| CVKLTPLCVSLKCTDLKNDTNTNSSSGRMIMEKGEIKNCSFNI | |
| STSIRGKVQKEYAFFYKLDIIPIDNDTTSYTLTSCNTSVITQAC | |
| PKVSFEPIPIHYCAPAGFAILKCNNKTFNGTGPCTNVSTVQCT | |
| HGIRPVVSTQLLLNGSLAEEEVVIRSANFTDNAKTIIVQLNQS | |
| VEINCTRPNNNTRKSIRIQRGPGRAFVTIGKIGNMRQAHCNIS | |
| RAKWNNTLKQIDSKLREQFGNNKTIIFKQSSGGDPEIVTHSFN | |
| CGGEFFYCNSTQLFNSTWFNSTWSTKGSNNTEGSDTITLPCRI | |
| KQIINMWQEVGKAMYAPPISGQIRCSSNITGLLLTRDGGNSN | |
| NESEIFRPGGGDMRDNWRSELYKYKVVKIEPLGVAPTKAKR | |
| RVVQREKRAVGIGALFLGFLGAAGSTMGAASMTLTVQARQL | |
| LSGIVQQQNNLLRAIEAQQHLLQLTVWGIKQLQARILAVERR | |
| FKDQQLLGIWGCSGKLICTTAVPWNASWSNKSLEQIWNNMT | |
| WMEWDREINNYTSLIHSLIEESQNQQEKNEQELLELDKWASL | |
| WNWFNITNWLWYIKLFIMIVGGLVGLRIVFAVLSVVNRVRQ | |
| GYSPLSFQTHLPIPRGPDRPEGIEEEGGERDRDRSIRLVNGSLA | |
| LIWDDLRSLCLFSYHRLRDLLLIVTRIVELLGRRGWEALKYW | |
| WNLLQYWSQELKNSAVSLLNATAIAVAEGTDRVIEVVQGAY | |
| RAIRHIPRRIRQGLERILL | |
| MRVKEKYQHLWRWGWRWGTMLLGMLMICSATEKLWVTV | SEQ |
| YYGVPVWKEATTTLFCASDAKAYDTEVHNVWATHACVPTD | ID NO: |
| PNPQEVVLVNVTENFNMWKNDMVEQMHEDIISLWDQSLKP | 268 |
| CVKLTPLCVSLKCTDLKNDTNTNSSSGRMIMEKGEIKNCSFNI | |
| STSIRGKVQKEYAFFYKLDIIPIDNDTTSYTLTSCNTSVITQAC | |
| PKVSFEPIPIHYCAPAGFAILKCNNKTFNGTGPCTNVSTVQCT | |
| HGIRPVVSTQLLLNGSLAEEEVVIRSANFTDNAKTIIVQLNQS | |
| VEINCTRPNNNTRKSIRIQRGPGRAFVTIGKIGNMRQAHCNIS | |
| RAKWNNTLKQIDSKLREQFGNNKTIIFKQSSGGDPEIVTHSFN | |
| CGGEFFYCNSTQLFNSTWFNSTWSTKGSNNTEGSDTITLPCRI | |
| KQIINMWQEVGKAMYAPPISGQIRCSSNITGLLLTRDGGNSN | |
| NESEIFRPGGGDMRDNWRSELYKYKVVKIEPLGVAPTKAKR | |
| RVVQREKRAVGIGALFLGFLGAAGSTMGAASMTLTVQARQL | |
| LSGIVQQQNNLLRAIEAQQHLLQLTVWGIKQLQARILAVERR | |
| GKDQQLLGIWGCSGKLICTTAVPWNASWSNKSLEQIWNNM | |
| TWMEWDREINNYTSLIHSLIEESQNQQEKNEQELLELDKWAS | |
| LWNWFNITNWLWYIKLFIMIVGGLVGLRIVFAVLSVVNRVR | |
| QGYSPLSFQTHLPIPRGPDRPEGIEEEGGERDRDRSIRLVNGSL | |
| ALIWDDLRSLCLFSYHRLRDLLLIVTRIVELLGRRGWEALKY | |
| WWNLLQYWSQELKNSAVSLLNATAIAVAEGTDRVIEVVQG | |
| AYRAIRHIPRRIRQGLERILL | |
| MRVKEKYQHLWRWGWRWGTMLLGMLMICSATEKLWVTV | SEQ |
| YYGVPVWKEATTTLFCASDAKAYDTEVHNVWATHACVPTD | ID NO: |
| PNPQEVVLVNVTENFNMWKNDMVEQMHEDIISLWDQSLKP | 269 |
| CVKLTPLCVSLKCTDLKNDTNTNSSSGRMIMEKGEIKNCSFNI | |
| STSIRGKVQKEYAFFYKLDIIPIDNDTTSYTLTSCNTSVITQAC | |
| PKVSFEPIPIHYCAPAGFAILKCNNKTFNGTGPCTNVSTVQCT | |
| HGIRPVVSTQLLLNGSLAEEEVVIRSANFTDNAKTIIVQLNQS | |
| VEINCTRPNNNTRKSIRIQRGPGRAFVTIGKIGNMRQAHCNIS | |
| RAKWNNTLKQIDSKLREQFGNNKTIIFKQSSGGDPEIVTHSFN | |
| CGGEFFYCNSTQLFNSTWFNSTWSTKGSNNTEGSDTITLPCRI | |
| KQIINMWQEVGKAMYAPPISGQIRCSSNITGLLLTRDGGNSN | |
| NESEIFRPGGGDMRDNWRSELYKYKVVKIEPLGVAPTKAKR | |
| RVVQREKRAVGIGALFLGFLGAAGSTMGAASMTLTVQARQL | |
| LSGIVQQQNNLLRAIEAQQHLLQLTVWGIKQLQARILAVERR | |
| RKDQQLLGIWGCSGKLICTTAVPWNASWSNKSLEQIWNNM | |
| TWMEWDREINNYTSLIHSLIEESQNQQEKNEQELLELDKWAS | |
| LWNWFNITNWLWYIKLFIMIVGGLVGLRIVFAVLSVVNRVR | |
| QGYSPLSFQTHLPIPRGPDRPEGIEEEGGERDRDRSIRLVNGSL | |
| ALIWDDLRSLCLFSYHRLRDLLLIVTRIVELLGRRGWEALKY | |
| WWNLLQYWSQELKNSAVSLLNATAIAVAEGTDRVIEVVQG | |
| AYRAIRHIPRRIRQGLERILL | |

[0301] The invention also encompasses the variants of the above sequences, harbouring the above mentioned mutations, and conferring to said variant a lack of immunosuppressive properties.

[0302] In particular, the invention relates to a pharmaceutical composition as defined above, wherein said isolated mutated human or simian lentiviral ENV protein consists of one of the amino acid sequences: SEQ ID NO: 212, 214, 216, 218 to 224, 226 to 232, 234 to 241, 243, 245, 247 to 253, 255 to 261, 263 to 269.

[0303] The invention also relates to a pharmaceutical composition as defined above, wherein said mutated protein comprises additional mutations either downstream the C-terminal end of the sequence SEQ ID NO: 416 or upstream the N-terminal end of SEQ ID NO: 416.

[0304] These additional mutations can be advantageous to maintain the three-dimensional structure of the immunosuppressive domain and of the ENV protein (see details concerning the membrane expression of the ENV protein [see FIG. 4 and example] and concerning infectivity [see FIG. 5 and example]).

[0305] In a particular embodiment, the invention relates to a pharmaceutical composition as defined above, wherein said mutated protein comprises an additional mutation in one at least of the amino acids at positions 29, 36 and 37 of SEQ ID NO: 426:

(SEQ ID NO: 426)

A[I/V]E[K/R]XₐX_{b}X₁DQX₂X₃LX₄X₅WGC
[A/S][F/G]X₆X₇CVX₈TX₉VPX_{c}X₁₀Z₁Z₂Z₃Z₄Z₅X_{d}Xₑ[S/T]

wherein

[0306] Xₐ and X_{b} are as defined above,

[0307] X₁ to X₁₀ represent any amino acid,

[0308] Z₁ to Z₅ represent no amino acid or any amino acid, independently from each other

such that
[0309] X_{c} is A, C, D, E, F, G, H, I, K, L, M, N, P, Q, R, S, T, V, Y, or deleted, preferably A, D, or N,
[0310] X_{d} is A, C, D, E, F, G, H, I, L, M, N, P, Q, R, S, T, V, Y, W, or deleted, preferably A, G, S or Y,
[0311] Xₑ is A, C, D, E, F, G, H, I, K, L, M, N, P, Q, R, T, V, Y, W, or deleted, preferably A, D or N.

[0312] This sequence contains the following amino acid sequence A[I/V]E[K/R]XₐX_{b}X₁DQ (SEQ ID NO: 416) elongated on its C-terminal end in which additional mutations are present.

[0313] It is to be noted that “X₁” in the above mentioned sequence SEQ ID NO: 426 has the same meaning as “X” in SEQ ID NO: 416.

[0314] In one advantageous embodiment, the invention relates to a pharmaceutical composition as defined above, said mutated protein comprising the amino acid sequences of the group consisting of SEQ ID NO: 271 to SEQ ID NO: 283.

SEQ ID NO: 271, contains the mutations Y41R, K72A:
SGIVQQQNNLLRAIEAQQHLLQLTVWGIKQLQARILAVERRLKDQQLLGI
WGCSGKLICTTAVPWNASWSNASLEQIWNNMTWMEWDREINNYTSLIHSL
IEESQNQQEKNEQEL.
SEQ ID NO: 272, contains the mutations Y41R, K72G:
SGIVQQQNNLLRAIEAQQHLLQLTVWGIKQLQARILAVERRLKDQQLLGI
WGCSGKLICTTAVPWNASWSNGSLEQIWNNMTWMEWDREINNYTSLIHSL
IEESQNQQEKNEQEL.
SEQ ID NO: 273, contains the mutations Y41R, K72S:
SGIVQQQNNLLRAIEAQQHLLQLTVWGIKQLQARILAVERRLKDQQLLGI
WGCSGKLICTTAVPWNASWSNSSLEQIWNNMTWMEWDREINNYTSLIHSL
IEESQNQQEKNEQEL.
SEQ ID NO: 274, contains the mutations Y41R, W65D:
SGIVQQQNNLLRAIEAQQHLLQLTVWGIKQLQARILAVERRLKDQQLLGI
WGCSGKLICTTAVPDNASWSNKSLEQIWNNMTWMEWDREINNYTSLIHSL
IEESQNQQEKNEQEL.
SEQ ID NO: 275, contains the mutations Y41R, W65A:
SGIVQQQNNLLRAIEAQQHLLQLTVWGIKQLQARILAVERRLKDQQLLGI
WGCSGKLICTTAVPANASWSNKSLEQIWNNMTWMEWDREINNYTSLIHSL
IEESQNQQEKNEQEL.
SEQ ID NO: 276, contains the mutations Y41R, W65N:
SGIVQQQNNLLRAIEAQQHLLQLTVWGIKQLQARILAVERRLKDQQLLGI
WGCSGKLICTTAVPNNASWSNKSLEQIWNNMTWMEWDREINNYTSLIHSL
IEESQNQQEKNEQEL.
SEQ ID NO: 277, contains the mutations Y41R, S73D:
SGIVQQQNNLLRAIEAQQHLLQLTVWGIKQLQARILAVERRLKDQQLLGI
WGCSGKLICTTAVPWNASWSNKDLEQIWNNMTWMEWDREINNYTSLIHSL
IEESQNQQEKNEQEL.
SEQ ID NO: 278, contains the mutations Y41R, S73A:
SGIVQQQNNLLRAIEAQQHLLQLTVWGIKQLQARILAVERRLKDQQLLGI
WGCSGKLICTTAVPWNASWSNKALEQIWNNMTWMEWDREINNYTSLIHSL
IEESQNQQEKNEQEL.
SEQ ID NO: 279, contains the mutations Y41R, S73N:
SGIVQQQNNLLRAIEAQQHLLQLTVWGIKQLQARILAVERRLKDQQLLGI
WGCSGKLICTTAVPWNASWSNKNLEQIWNNMTWMEWDREINNYTSLIHSL
IEESQNQQEKNEQEL.
SEQ ID NO: 280, contains the mutations Y41R, K72Y:
SGIVQQQNNLLRAIEAQQHLLQLTVWGIKQLQARILAVERRLKDQQLLGI
WGCSGKLICTTAVPWNASWSNYSLEQIWNNMTWMEWDREINNYTSLIHSL
IEESQNQQEKNEQEL.
SEQ ID NO: 281, contains the mutations R40A,
Y41R, K72A:
SGIVQQQNNLLRAIEAQQHLLQLTVWGIKQLQARILAVEARLKDQQLLGI
WGCSGKLICTTAVPWNASWSNASLEQIWNNMTWMEWDREINNYTSLIHSL
IEESQNQQEKNEQEL.
SEQ ID NO: 282, contains the mutations Y41R,
K72A, S73A:
SGIVQQQNNLLRAIEAQQHLLQLTVWGIKQLQARILAVERRLKDQQLLGI
WGCSGKLICTTAVPWNASWSNAALEQIWNNMTWMEWDREINNYTSLIHSL
IEESQNQQEKNEQEL.
SEQ ID NO: 283, contains the mutations Y41R,
W65A, K72A, S73A:
SGIVQQQNNLLRAIEAQQHLLQLTVWGIKQLQARILAVERRLKDQQLLGI
WGCSGKLICTTAVPANASWSNAALEQIWNNMTWMEWDREINNYTSLIHSL
IEESQNQQEKNEQEL.

[0315] The mutations in the above mutated peptides are indicated by the amino acid residues which are bolded and underlined.

[0316] In another aspect, the invention relates to a pharmaceutical composition as defined above, comprising an additional mutation of one at least of the amino acids X₁₁, X₁₂, X₁₃ and X₁₄ in the following sequence (containing the above defined SEQ ID NO: 416 sequence):

(SEQ ID NO: 428)

X₁₁X₁₂X₁₃X₁₄ILA[I/V]E[K/R]XₐX_{b}X₁DQ,

wherein
X₁ represents any amino acid,
Xa and Xb are as defined above,

### X₁₁ is:

[0317] either deleted,
[0318] or A, C, D, E, F, G, H, I, K, M, N, P, Q, R, S, T, V, Y or W, in particular A, G or R,
   and/or

### X₁₂ is:

[0319] either deleted,
[0320] or A, C, D, E, F, G, H, I, K, L, M, N, P, R, S, T, V, Y or W, in particular A, G or R,
   and/or

### X₁₃ is:

[0321] either deleted,
[0322] or C, D, E, F, G, H, I, K, L, M, N, P, Q, R, S, T, V, Y or W, in particular R or G,
   and/or

### X₁₄ is:

[0323] either deleted,
[0324] or A, C, D, E, F, G, H, I, K, L, M, N, P, Q, S, T, V, Y or W, in particular A or G.

[0325] This sequence contains the following amino acid sequence A[I/V]E[K/R]XₐX_{b}X₁DQ (SEQ ID NO: 416) elongated on its N-terminal end in which additional mutations are present.

[0326] It is to be noted that “X₁” in SEQ ID NO: 428 has exactly the same meaning as “X” in SEQ ID NO: 416.

[0327] In another advantageous embodiment, the invention relates to a pharmaceutical composition as defined above, wherein said mutated lentiviral protein, said variant or said fragment harbour a three-dimensional structure similar to the structure of the natural non mutated lentiviral ENV protein, non mutated lentiviral ENV variant or non mutated lentiviral ENV fragment thereof.

[0328] The skilled person knows how to measure the antigenicity, by using standard proceedings.

[0329] In another advantageous embodiment, the invention relates to a pharmaceutical composition as defined above, wherein said mutated lentiviral protein, said variant or said fragment are expressed at the plasma membrane at a level substantially identical to the expression at the plasma membrane of the natural non mutated lentiviral ENV protein, non mutated lentiviral ENV variant or non mutated lentiviral ENV fragment thereof.

[0330] The membrane expression of the lentiviral ENV protein according to the invention can be measured by any techniques allowing determination of a plasma membrane protein. For instance, cells can be transfected with an expression vector allowing the expression of the mutated lentiviral ENV protein according to the invention. Cells are then incubated with an antibody recognizing specifically the extracellular part of said lentiviral mutated ENV protein. The complex (antibody/ENV protein) is detected by another antibody, and the complex can be quantified by flow cytometry (see for instance FIG. 4, and example).

[0331] If no complex is detected, the mutated ENV protein is not expressed at the plasma membrane. On the contrary, if the protein is expressed, this means that the mutated ENV protein is expressed at the plasma membrane.

[0332] In another advantageous embodiment, the invention relates to a pharmaceutical composition as defined above, wherein said mutated lentiviral ENV protein is such that a lentivirus, or a pseudotype, expressing said mutated lentiviral ENV protein, instead of the non mutated ENV protein, has a viral titer similar to the viral titer of said lentivirus, or pseudotype, expressing the non mutated lentiviral protein.

[0333] Viral titer is measured according to a commonly used protocol, and as described in the example (see FIG. 5).

[0334] In another advantageous embodiment, the invention relates to a pharmaceutical composition as defined above, wherein said mutated lentiviral ENV protein is a HIV-1 lentiviral protein consisting of the amino acid sequences SEQ ID NO: 284 to SEQ ID NO: 292.

| | |
|---|---|
| SEQ ID NO: 284 | MRVKEKYQHLWRWGWKWGTMLLGILMICSATEKLWV |
| Y41R | TVYYGVPVWKEATTTLFCASDAKAYDTEVHNVWATH |
| | ACVPTDPNPQEVVLVNVTENFNMWKNDMVEQMHEDI |
| | ISLWDQSLKPCVKLTPLCVSLKCTDLGNATNTNSSN |
| | TNSSSGEMMMEKGEIKNCSFNISTSIRGKVQKEYAF |
| | FYKLDIIPIDNDTTSYTLTSCNTSVITQACPKVSFE |
| | PIPIHYCAPAGFAILKCNNKTFNGTGPCTNVSTVQC |
| | THGIRPVVSTQLLLNGSLAEEEVVIRSANFTDNAKT |
| | IIVQLNQSVEINCTRPNNNTRKSIRIQRGPGRAFVT |
| | IGKIGNMRQAHCNISRAKWNATLKQIASKLREQFGN |
| | NKTIIFKQSSGGDPEIVTHSFNCGGEFFYCNSTQLF |
| | NSTWFNSTWSTEGSNNTEGSDTITLPCRIKQFINMW |
| | QEVGKAMYAPPISGQIRCSSNITGLLLTRDGGNNNN |
| | GSEIFRPGGGDMRDNWRSELYKYKVVKIEPLGVAPT |
| | KAKRRVVQREKRAVGIGALFLGFLGAAGSTMGARSM |
| | TLTVQARQLLSGIVQQQNNLLRAIEAQQHLLQLTVW |
| | GIKQLQARILAVERRLKDQQLLGIWGCSGKLICTTA |
| | VPWNASWSNKSLEQIWNNMTWMEWDREINNYTSLIH |
| | SLIEESQNQQEKNEQELLELDKWASLWNWFNITNWL |
| | WYIKIFIMIVGGLVGLRIVFAVLSIVNRVRQGYSPL |
| | SFQTHLPTPRGPDRPEGIEEEGGERDRDRSIRLVNG |
| | SLALIWDDLRSLCLFSYHRLRDLLLIVTRIVELLGR |
| | RGWEALKYWWNLLQYWSQELKNSAVSLLNATAIAVA |
| | EGTDRVIEVVQGACRAIRHIPRRIRQGLERILL |
| SEQ ID NO: 285 | MRVKEKYQHLWRWGWKWGTMLLGILMICSATEKLWV |
| Y41R, K72A | TVYYGVPVWKEATTTLFCASDAKAYDTEVHNVWATH |
| | ACVPTDPNPQEVVLVNVTENFNMWKNDMVEQMHEDI |
| | ISLWDQSLKPCVKLTPLCVSLKCTDLGNATNTNSSN |
| | TNSSSGEMMMEKGEIKNCSFNISTSIRGKVQKEYAF |
| | FYKLDIIPIDNDTTSYTLTSCNTSVITQACPKVSFE |
| | PIPIHYCAPAGFAILKCNNKTFNGTGPCTNVSTVQC |
| | THGIRPVVSTQLLLNGSLAEEEVVIRSANFTDNAKT |
| | IIVQLNQSVEINCTRPNNNTRKSIRIQRGPGRAFVT |
| | IGKIGNMRQAHCNISRAKWNATLKQIASKLREQFGN |
| | NKTIIFKQSSGGDPEIVTHSFNCGGEFFYCNSTQLF |
| | NSTWFNSTWSTEGSNNTEGSDTITLPCRIKQFINMW |
| | QEVGKAMYAPPISGQIRCSSNITGLLLTRDGGNNNN |
| | GSEIFRPGGGDMRDNWRSELYKYKVVKIEPLGVAPT |
| | KAKRRVVQREKRAVGIGALFLGFLGAAGSTMGARSM |
| | TLTVQARQLLSGIVQQQNNLLRAIEAQQHLLQLTVW |
| | GIKQLQARILAVERRLKDQQLLGIWGCSGKLICTTA |
| | VPWNASWSNASLEQIWNNMTWMEWDREINNYTSLIH |
| | SLIEESQNQQEKNEQELLELDKWASLWNWFNITNWL |
| | WYIKIFIMIVGGLVGLRIVFAVLSIVNRVRQGYSPL |
| | SFQTHLPTPRGPDRPEGIEEEGGERDRDRSIRLVNG |
| | SLALIWDDLRSLCLFSYHRLRDLLLIVTRIVELLGR |
| | RGWEALKYWWNLLQYWSQELKNSAVSLLNATAIAVA |
| | EGTDRVIEVVQGACRAIRHIPRRIRQGLERILL |
| SEQ ID NO: 286 | MRVKEKYQHLWRWGWKWGTMLLGILMICSATEKLWV |
| Y41R, K72G | TVYYGVPVWKEATTTLFCASDAKAYDTEVHNVWATH |
| | ACVPTDPNPQEVVLVNVTENFNMWKNDMVEQMHEDI |
| | ISLWDQSLKPCVKLTPLCVSLKCTDLGNATNTNSSN |
| | TNSSSGEMMMEKGEIKNCSFNISTSIRGKVQKEYAF |
| | FYKLDIIPIDNDTTSYTLTSCNTSVITQACPKVSFE |
| | PIPIHYCAPAGFAILKCNNKTFNGTGPCTNVSTVQC |
| | THGIRPVVSTQLLLNGSLAEEEVVIRSANFTDNAKT |
| | IIVQLNQSVEINCTRPNNNTRKSIRIQRGPGRAFVT |
| | IGKIGNMRQAHCNISRAKWNATLKQIASKLREQFGN |
| | NKTIIFKQSSGGDPEIVTHSFNCGGEFFYCNSTQLF |
| | NSTWFNSTWSTEGSNNTEGSDTITLPCRIKQFINMW |
| | QEVGKAMYAPPISGQIRCSSNITGLLLTRDGGNNNN |
| | GSEIFRPGGGDMRDNWRSELYKYKVVKIEPLGVAPT |
| | KAKRRVVQREKRAVGIGALFLGFLGAAGSTMGARSM |
| | TLTVQARQLLSGIVQQQNNLLRAIEAQQHLLQLTVW |
| | GIKQLQARILAVERRLKDQQLLGIWGCSGKLICTTA |
| | VPWNASWSNGSLEQIWNNMTWMEWDREINNYTSLIH |
| | SLIEESQNQQEKNEQELLELDKWASLWNWFNITNWL |
| | WYIKIFIMIVGGLVGLRIVFAVLSIVNRVRQGYSPL |
| | SFQTHLPTPRGPDRPEGIEEEGGERDRDRSIRLVNG |
| | SLALIWDDLRSLCLFSYHRLRDLLLIVTRIVELLGR |
| | RGWEALKYWWNLLQYWSQELKNSAVSLLNATAIAVA |
| | EGTDRVIEVVQGACRAIRHIPRRIRQGLERILL |
| SEQ ID NO: 287 | MRVKEKYQHLWRWGWKWGTMLLGILMICSATEKLWV |
| Y41R, K72S | TVYYGVPVWKEATTTLFCASDAKAYDTEVHNVWATH |
| | ACVPTDPNPQEVVLVNVTENFNMWKNDMVEQMHEDI |
| | ISLWDQSLKPCVKLTPLCVSLKCTDLGNATNTNSSN |
| | TNSSSGEMMMEKGEIKNCSFNISTSIRGKVQKEYAF |
| | FYKLDIIPIDNDTTSYTLTSCNTSVITQACPKVSFE |
| | PIPIHYCAPAGFAILKCNNKTFNGTGPCTNVSTVQC |
| | THGIRPVVSTQLLLNGSLAEEEVVIRSANFTDNAKT |
| | IIVQLNQSVEINCTRPNNNTRKSIRIQRGPGRAFVT |
| | IGKIGNMRQAHCNISRAKWNATLKQIASKLREQFGN |
| | NKTIIFKQSSGGDPEIVTHSFNCGGEFFYCNSTQLF |
| | NSTWFNSTWSTEGSNNTEGSDTITLPCRIKQFINMW |
| | QEVGKAMYAPPISGQIRCSSNITGLLLTRDGGNNNN |
| | GSEIFRPGGGDMRDNWRSELYKYKVVKIEPLGVAPT |
| | KAKRRVVQREKRAVGIGALFLGFLGAAGSTMGARSM |
| | TLTVQARQLLSGIVQQQNNLLRAIEAQQHLLQLTVW |
| | GIKQLQARILAVERRLKDQQLLGIWGCSGKLICTTA |
| | VPWNASWSNSSLEQIWNNMTWMEWDREINNYTSLIH |
| | SLIEESQNQQEKNEQELLELDKWASLWNWFNITNWL |
| | WYIKIFIMIVGGLVGLRIVFAVLSIVNRVRQGYSPL |
| | SFQTHLPTPRGPDRPEGIEEEGGERDRDRSIRLVNG |
| | SLALIWDDLRSLCLFSYHRLRDLLLIVTRIVELLGR |
| | RGWEALKYWWNLLQYWSQELKNSAVSLLNATAIAVA |
| | EGTDRVIEVVQGACRAIRHIPRRIRQGLERILL |
| SEQ ID NO: 288 | MRVKEKYQHLWRWGWKWGTMLLGILMICSATEKLWV |
| Y41G | TVYYGVPVWKEATTTLFCASDAKAYDTEVHNVWATH |
| | ACVPTDPNPQEVVLVNVTENFNMWKNDMVEQMHEDI |
| | ISLWDQSLKPCVKLTPLCVSLKCTDLGNATNTNSSN |
| | TNSSSGEMMMEKGEIKNCSFNISTSIRGKVQKEYAF |
| | FYKLDIIPIDNDTTSYTLTSCNTSVITQACPKVSFE |
| | PIPIHYCAPAGFAILKCNNKTFNGTGPCTNVSTVQC |
| | THGIRPVVSTQLLLNGSLAEEEVVIRSANFTDNAKT |
| | IIVQLNQSVEINCTRPNNNTRKSIRIQRGPGRAFVT |
| | IGKIGNMRQAHCNISRAKWNATLKQIASKLREQFGN |
| | NKTIIFKQSSGGDPEIVTHSFNCGGEFFYCNSTQLF |
| | NSTWFNSTWSTEGSNNTEGSDTITLPCRIKQFINMW |
| | QEVGKAMYAPPISGQIRCSSNITGLLLTRDGGNNNN |
| | GSEIFRPGGGDMRDNWRSELYKYKVVKIEPLGVAPT |
| | KAKRRVVQREKRAVGIGALFLGFLGAAGSTMGARSM |
| | TLTVQARQLLSGIVQQQNNLLRAIEAQQHLLQLTVW |
| | GIKQLQARILAVERGLKDQQLLGIWGCSGKLICTTA |
| | VPWNASWSNKSLEQIWNNMTWMEWDREINNYTSLIH |
| | SLIEESQNQQEKNEQELLELDKWASLWNWFNITNWL |
| | WYIKIFIMIVGGLVGLRIVFAVLSIVNRVRQGYSPL |
| | SFQTHLPTPRGPDRPEGIEEEGGERDRDRSIRLVNG |
| | SLALIWDDLRSLCLFSYHRLRDLLLIVTRIVELLGR |
| | RGWEALKYWWNLLQYWSQELKNSAVSLLNATAIAVA |
| | EGTDRVIEVVQGACRAIRHIPRRIRQGLERILL |
| SEQ ID NO: 289 | MRVKEKYQHLWRWGWKWGTMLLGILMICSATEKLWV |
| Y41L | TVYYGVPVWKEATTTLFCASDAKAYDTEVHNVWATH |
| | ACVPTDPNPQEVVLVNVTENFNMWKNDMVEQMHEDI |
| | ISLWDQSLKPCVKLTPLCVSLKCTDLGNATNTNSSN |
| | TNSSSGEMMMEKGEIKNCSFNISTSIRGKVQKEYAF |
| | FYKLDIIPIDNDTTSYTLTSCNTSVITQACPKVSFE |
| | PIPIHYCAPAGFAILKCNNKTFNGTGPCTNVSTVQC |
| | THGIRPVVSTQLLLNGSLAEEEVVIRSANFTDNAKT |
| | IIVQLNQSVEINCTRPNNNTRKSIRIQRGPGRAFVT |
| | IGKIGNMRQAHCNISRAKWNATLKQIASKLREQFGN |
| | NKTIIFKQSSGGDPEIVTHSFNCGGEFFYCNSTQLF |
| | NSTWFNSTWSTEGSNNTEGSDTITLPCRIKQFINMW |
| | QEVGKAMYAPPISGQIRCSSNITGLLLTRDGGNNNN |
| | GSEIFRPGGGDMRDNWRSELYKYKVVKIEPLGVAPT |
| | KAKRRVVQREKRAVGIGALFLGFLGAAGSTMGARSM |
| | TLTVQARQLLSGIVQQQNNLLRAIEAQQHLLQLTVW |
| | GIKQLQARILAVERLLKDQQLLGIWGCSGKLICTTA |
| | VPWNASWSNKSLEQIWNNMTWMEWDREINNYTSLIH |
| | SLIEESQNQQEKNEQELLELDKWASLWNWFNITNWL |
| | WYIKIFIMIVGGLVGLRIVFAVLSIVNRVRQGYSPL |
| | SFQTHLPTPRGPDRPEGIEEEGGERDRDRSIRLVNG |
| | SLALIWDDLRSLCLFSYHRLRDLLLIVTRIVELLGR |
| | RGWEALKYWWNLLQYWSQELKNSAVSLLNATAIAVA |
| | EGTDRVIEVVQGACRAIRHIPRRIRQGLERILL |
| SEQ ID NO: 290 | MRVKEKYQHLWRWGWKWGTMLLGILMICSATEKLWV |
| Y41A | TVYYGVPVWKEATTTLFCASDAKAYDTEVHNVWATH |
| | ACVPTDPNPQEVVLVNVTENFNMWKNDMVEQMHEDI |
| | ISLWDQSLKPCVKLTPLCVSLKCTDLGNATNTNSSN |
| | TNSSSGEMMMEKGEIKNCSFNISTSIRGKVQKEYAF |
| | FYKLDIIPIDNDTTSYTLTSCNTSVITQACPKVSFE |
| | PIPIHYCAPAGFAILKCNNKTFNGTGPCTNVSTVQC |
| | THGIRPVVSTQLLLNGSLAEEEVVIRSANFTDNAKT |
| | IIVQLNQSVEINCTRPNNNTRKSIRIQRGPGRAFVT |
| | IGKIGNMRQAHCNISRAKWNATLKQIASKLREQFGN |
| | NKTIIFKQSSGGDPEIVTHSFNCGGEFFYCNSTQLF |
| | NSTWFNSTWSTEGSNNTEGSDTITLPCRIKQFINMW |
| | QEVGKAMYAPPISGQIRCSSNITGLLLTRDGGNNNN |
| | GSEIFRPGGGDMRDNWRSELYKYKVVKIEPLGVAPT |
| | KAKRRVVQREKRAVGIGALFLGFLGAAGSTMGARSM |
| | TLTVQARQLLSGIVQQQNNLLRAIEAQQHLLQLTVW |
| | GIKQLQARILAVERALKDQQLLGIWGCSGKLICTTA |
| | VPWNASWSNKSLEQIWNNMTWMEWDREINNYTSLIH |
| | SLIEESQNQQEKNEQELLELDKWASLWNWFNITNWL |
| | WYIKIFIMIVGGLVGLRIVFAVLSIVNRVRQGYSPL |
| | SFQTHLPTPRGPDRPEGIEEEGGERDRDRSIRLVNG |
| | SLALIWDDLRSLCLFSYHRLRDLLLIVTRIVELLGR |
| | RGWEALKYWWNLLQYWSQELKNSAVSLLNATAIAVA |
| | EGTDRVIEVVQGACRAIRHIPRRIRQGLERILL |
| SEQ ID NO: 291 | MRVKEKYQHLWRWGWKWGTMLLGILMICSATEKLWV |
| Y41F | TVYYGVPVWKEATTTLFCASDAKAYDTEVHNVWATH |
| | ACVPTDPNPQEVVLVNVTENFNMWKNDMVEQMHEDI |
| | ISLWDQSLKPCVKLTPLCVSLKCTDLGNATNTNSSN |
| | TNSSSGEMMMEKGEIKNCSFNISTSIRGKVQKEYAF |
| | FYKLDIIPIDNDTTSYTLTSCNTSVITQACPKVSFE |
| | PIPIHYCAPAGFAILKCNNKTFNGTGPCTNVSTVQC |
| | THGIRPVVSTQLLLNGSLAEEEVVIRSANFTDNAKT |
| | IIVQLNQSVEINCTRPNNNTRKSIRIQRGPGRAFVT |
| | IGKIGNMRQAHCNISRAKWNATLKQIASKLREQFGN |
| | NKTIIFKQSSGGDPEIVTHSFNCGGEFFYCNSTQLF |
| | NSTWFNSTWSTEGSNNTEGSDTITLPCRIKQFINMW |
| | QEVGKAMYAPPISGQIRCSSNITGLLLTRDGGNNNN |
| | GSEIFRPGGGDMRDNWRSELYKYKVVKIEPLGVAPT |
| | KAKRRVVQREKRAVGIGALFLGFLGAAGSTMGARSM |
| | TLTVQARQLLSGIVQQQNNLLRAIEAQQHLLQLTVW |
| | GIKQLQARILAVERFLKDQQLLGIWGCSGKLICTTA |
| | VPWNASWSNKSLEQIWNNMTWMEWDREINNYTSLIH |
| | SLIEESQNQQEKNEQELLELDKWASLWNWFNITNWL |
| | WYIKIFIMIVGGLVGLRIVFAVLSIVNRVRQGYSPL |
| | SFQTHLPTPRGPDRPEGIEEEGGERDRDRSIRLVNG |
| | SLALIWDDLRSLCLFSYHRLRDLLLIVTRIVELLGR |
| | RGWEALKYWWNLLQYWSQELKNSAVSLLNATAIAVA |
| | EGTDRVIEVVQGACRAIRHIPRRIRQGLERILL |
| SEQ ID NO: 292 | MRVKEKYQHLWRWGWKWGTMLLGILMICSATEKLWV |
| L42R | TVYYGVPVWKEATTTLFCASDAKAYDTEVHNVWATH |
| | ACVPTDPNPQEVVLVNVTENFNMWKNDMVEQMHEDI |
| | ISLWDQSLKPCVKLTPLCVSLKCTDLGNATNTNSSN |
| | TNSSSGEMMMEKGEIKNCSFNISTSIRGKVQKEYAF |
| | FYKLDIIPIDNDTTSYTLTSCNTSVITQACPKVSFE |
| | PIPIHYCAPAGFAILKCNNKTFNGTGPCTNVSTVQC |
| | THGIRPVVSTQLLLNGSLAEEEVVIRSANFTDNAKT |
| | IIVQLNQSVEINCTRPNNNTRKSIRIQRGPGRAFVT |
| | IGKIGNMRQAHCNISRAKWNATLKQIASKLREQFGN |
| | NKTIIFKQSSGGDPEIVTHSFNCGGEFFYCNSTQLF |
| | NSTWFNSTWSTEGSNNTEGSDTITLPCRIKQFINMW |
| | QEVGKAMYAPPISGQIRCSSNITGLLLTRDGGNNNN |
| | GSEIFRPGGGDMRDNWRSELYKYKVVKIEPLGVAPT |
| | KAKRRVVQREKRAVGIGALFLGFLGAAGSTMGARSM |
| | TLTVQARQLLSGIVQQQNNLLRAIEAQQHLLQLTVW |
| | GIKQLQARILAVERYRKDQQLLGIWGCSGKLICTTA |
| | VPWNASWSNKSLEQIWNNMTWMEWDREINNYTSLIH |
| | SLIEESQNQQEKNEQELLELDKWASLWNWFNITNWL |
| | WYIKIFIMIVGGLVGLRIVFAVLSIVNRVRQGYSPL |
| | SFQTHLPTPRGPDRPEGIEEEGGERDRDRSIRLVNG |
| | SLALIWDDLRSLCLFSYHRLRDLLLIVTRIVELLGR |
| | RGWEALKYWWNLLQYWSQELKNSAVSLLNATAIAVA |
| | EGTDRVIEVVQGACRAIRHIPRRIRQGLERILL |

[0335] Also, the following proteins are advantageous in the invention:

| | |
|---|---|
| SEQ ID NO: 293 | MGCLGNQLLIAILLLSVYGIYCTQYVTVFYGVPAWR |
| SIV MM251 | NATIPLFCATKNRDTWGTTQCLPDNGDYSELALNVT |
| L42R | ESFDAWENTVTEQAIEDVWQLFETSIKPCVKLSPLC |
| | ITMRCNKSETDRWGLTKSSTTITTAAPTSAPVSEKI |
| | DMVNETSSCIAQNNCTGLEQEQMISCKFTMTGLKRD |
| | KTKEYNETWYSTDLVCEQGNSTDNESRCYMNHCNTS |
| | VIQESCDKHYWDTIRFRYCAPPGYALLRCNDTNYSG |
| | FMPKCSKVVVSSCTRMMETQTSTWFGFNGTRAENRT |
| | YIYWHGRDNRTIISLNKYYNLTMKCRRPGNKTVLPV |
| | TIMSGLVFHSQPINDRPKQAWCWFGGKWKDAIKEVK |
| | QTIVKHPRYTGTNNTDKINLTAPGGGDPEVTFMWTN |
| | CRGEFLYCKMNWFLNWVEDRDVTTQRPKERHRRNYV |
| | PCHIRQIINTWHKVGKNVYLPPREGDLTCNSTVTSL |
| | IANIDWTDGNQTSITMSAEVAELYRLELGDYKLVEI |
| | TPIGLAPTDVKRYTTGGTSRNKRGVFVLGFLGFLAT |
| | AGSAMGAASLTLTAQSRTLLAGIVQQQQQLLDVVKR |
| | QQELLRLTVWGTKNLQTRVTAIEKYRKDQAQLNAWG |
| | CAFRQVCHTTVPWPNASLTPDWNNDTWQEWERKVDF |
| | LEENITALLEEAQIQQEKNMYELQKLNSWDVFGNWF |
| | DLASWIKYIQYGIYVVVGVILLRIVIYIVQMLAKLR |
| | QGYRPVFSSPPSYFQXTHTQQDPALPTREGKEGDGG |
| | EGGGNSSWPWQIEYIHFLIRQLIRLLTWLFSNCRTL |
| | LSRAYQILQPILQRLSATLRRVREVLRTELTYLQYG |
| | WSYFHEAVQAGWRSATETLAGAWRDLWETLRRGGRW |
| | ILAIPRRIRQGLELTLL |
| SEQ ID NO: 294 | MEPGRNQLFVVILLTSACLVYCSQYVTVFYGIPAWK |
| HIV2 L42R | NASIPLFCATKNRDTWGTIQCLPDNDDYQEIILNVT |
| | EAFDAWNNTVTEQAVEDVWHLFETSIKPCVKLTPLC |
| | VAMNCSRVQGNTTTPNPRTSSSTTSRPPTSAASIIN |
| | ETSNCIENNTCAGLGYEEMMQCEFNMKGLEQDKKRR |
| | YKDTWYLEDVVCDNTTAGTCYMRHCNTSIIKESCDK |
| | HYWDAMRFRYCAPPGFALLRCNDTNYSGFEPKCTKV |
| | VAASCTRMMETQTSTWFGFNGTRAENRTYIYWHGRD |
| | NRTIISLNKYYNLTMRCKRPGNKTVLPITLMSGLVF |
| | HSQPINTRPRQAWCRFGGRWREAMQEVKQTLVQHPR |
| | YKGINDTGKINFTKPGAGSDPEVAFMWTNCRGEFLY |
| | CNMTWFLNWVEDKNQTRRNYCHIKQIINTWHKVGKN |
| | VYLPPREGELACESTVTSIIANIDIDKNRTHTNITF |
| | SAEVAELYRLELGDYKLIEITPIGFAPTDQRRYSST |
| | PVRNKRGVFVLGFLGFLATAGSAMGARSLTLSAQSR |
| | TLLAGIVQQQQQLLDVVKRQQEMLRLTVWGTKNLQA |
| | RVTAIEKYRKHQAQLNSWGCAFRQVCHTTVPWVNDS |
| | LSPDWKNMTWQEWEKQVRYLEANISQSLEEAQIQQE |
| | KNMYELQKLNSWDILGNWFDLTSWVKYIQYGVHIVV |
| | GIIALRIAIYVVQLLSRFRKGYRPVFSSPPGYLQQI |
| | HIHKDRGQPANEGTEEDVGGDSGYDLWPWPINYVQF |
| | LIHLLTRLLIGLYNICRDLLSKNSPTRRLISQSLTA |
| | IRDWLRLKAAQLQYGCEWIQEAFQAFARTTRETLAG |
| | AWGWLWEAARRIGRGILAVPRRIRQGAELALL |

[0336] Advantageously: the mutated lentiviral proteins are

1—SEQ ID NO: 284 to 294; these mutated ENV proteins having substantially no immunosuppressive properties advantageously,
2—SEQ ID NO: 284 to SEQ ID NO: 292; these mutated ENV proteins having substantially no immunosuppressive properties and being highly expressed at the plasma membrane, more advantageously,
3—SEQ ID NO: 284 to SEQ ID NO: 291; these mutated ENV proteins having substantially no immunosuppressive properties, being highly expressed at the plasma membrane and conferring to a virus expressing them a medium or high viral titer,
in particular
4—Y41F (SEQ ID NO: 291), Y41L (SEQ ID NO: 289), Y41A (SEQ ID NO: 290); these mutated ENV proteins having substantially no immunosuppressive properties, being highly expressed at the plasma membrane and confers to a virus expressing them a high viral titer. As mentioned above “confering to a virus expressing them a medium or high viral titer” means that, when the sequence of the wild type ENV protein is substituted by the sequence of the mutated ENV in the lentiviral or pseudotype retrovirus, the virus thus expresses a mutated lentiviral ENV protein, along with other wild type viral proteins (GAG, PRO, POL), said mutated ENV protein conferring to the virus the ability to enter in its target cell:
[0337] either at a level comparable or higher to the ability of the wild type virus, i.e. high ability
[0338] or at a lower level compared to the ability of the wild type virus, i.e. medium or low ability.

[0339] The ability to enter in the target cell can be measured by the viral load. Viral load is a measure of the amount of target cells that can be infected by a given amount (1 mL) of virus (see FIG. 5 and example).

[0340] The invention also relates to a pharmaceutical composition comprising a nucleic acid molecule coding for a mutated lentiviral ENV protein, or variant of said protein, or fragments thereof, as defined above, in association with a pharmaceutically acceptable carrier.

[0341] In one advantageous embodiment, the invention relates to a pharmaceutical composition as defined above, wherein said nucleic acid is comprised in a vector, said vector comprising means allowing the expression of said mutated lentiviral ENV protein, or variant of said protein, or fragments thereof.

[0342] In another advantageous embodiment, the invention relates to a pharmaceutical composition as defined above, wherein said nucleic acid is comprised in a vector, said nucleic acid being placed under the control of sequences that allow the expression of said mutated lentiviral ENV protein, or variant of said protein, or fragments thereof.

[0343] In another embodiment, the invention relates to a pharmaceutical composition, as defined above, in particular as a vaccine, comprising a DNA molecule coding for said mutated lentiviral ENV protein, or variant of said protein, or fragments thereof.

[0344] DNA vaccines expressing ENV proteins can be produced as described in Bellier et al., (DNA vaccines expressing retrovirus-like particles are efficient immunogens to induce neutralizing antibodies, Vaccine, 27(42):5772-80, 2009).

[0345] In another advantageous embodiment, the invention relates to a pharmaceutical composition as defined above, said vector being chosen among an eukaryotic or prokaryotic expression vector, in particular an eukaryotic vector which is a viral vector, in particular a pox vector, such as a fowlpox, a canarypox, or a MVA (modified vaccinia virus Ankara) vector, an adenoviral vector, a lentiviral vector, a measles vector, a Sendai virus or a CMV (cytomegalovirus) vector.

[0346] In another advantageous embodiment, the invention relates to a pharmaceutical composition as defined above, further comprising at least one nucleotide molecule coding for a GAG and/or a PRO and/or a POL protein and/or a mutated NEF protein substantially devoid of immunosuppressive properties, of a lentivirus, preferably a lentivirus of the same origin as the mutated lentiviral ENV protein.

[0347] The advantageous mutated Nef protein contains a substitution at position 93, as described in the international application WO 2006/018289 (Inventors: Renard M., Mangeney M. and Heidmann T.) and a deletion of the N-terminus of the protein involved in its myristoylation. GAG expression will produce virus like particles (VLPs) which are particularly advantageous for a vaccine, in particular if the ENV protein is associated with the VLP (Guerbois et al., Virology, 388:191-203, 2009).

[0348] In another particular embodiment, the invention relates to a pharmaceutical composition, as defined above, wherein said nucleic acid molecule coding for a mutated human or simian lentiviral ENV protein, or a fragment of said mutated human or simian lentiviral ENV protein, is contained in the same vector as the one which also contains said at least one nucleic acid molecule coding for a GAG protein and/or a PRO protein and/or a POL protein and/or a mutated NEF protein, wherein said mutated NEF protein is substantially devoid of immunosuppressive properties.

[0349] In another particular embodiment, the invention relates to a pharmaceutical composition, as defined above, wherein said nucleic acid molecule coding for a mutated human or simian lentiviral ENV protein, or a fragment of said mutated human or simian lentiviral ENV protein, is contained in the same vector as the one which also contains all said at least one nucleic acid molecule coding for a GAG protein and/or a PRO protein and/or a POL protein and/or a mutated NEF protein, wherein said mutated NEF protein is substantially devoid of immunosuppressive properties.

[0350] In another particular embodiment, the invention relates to a pharmaceutical composition, as defined above, wherein said nucleic acid molecule coding for a mutated human or simian lentiviral ENV protein, or a fragment of said mutated human or simian lentiviral ENV protein, is contained in a vector which is different from the at least one vector containing said at least one nucleic acid molecule coding for a GAG protein and/or a PRO protein and/or a POL protein and/or a mutated NEF protein, wherein said mutated NEF protein is substantially devoid of immunosuppressive properties.

[0351] In another particular embodiment, the invention relates to a pharmaceutical composition, as defined above, wherein said nucleic acid molecule coding for a mutated human or simian lentiviral ENV protein, or a fragment of said mutated human or simian lentiviral ENV protein, said nucleic acid molecule coding for a GAG protein, said nucleic acid molecule coding for a PRO protein, said nucleic acid molecule coding for a POL protein and said nucleic acid molecule coding for a mutated NEF protein substantially devoid of immunosuppressive properties, are all contained in vectors which are different from each other.

[0352] In another particular embodiment, the invention relates to a pharmaceutical composition, as defined above, comprising at least one nucleic acid molecule coding for a GAG protein and/or a mutated NEF protein, wherein said mutated NEF protein is substantially devoid of immunosuppressive properties,
[0353] of a human or simian lentivirus, said lentivirus being preferably of the same origin as the mutated lentiviral ENV protein.

[0354] In another particular embodiment, the invention relates to a pharmaceutical composition, as defined above, wherein said nucleic acid molecule coding for a mutated human or simian lentiviral ENV protein, or a fragment of said mutated human or simian lentiviral ENV protein, is contained in the same vector as the one which also contains said at least one nucleic acid molecule coding for a GAG protein and/or a mutated NEF protein, wherein said mutated NEF protein is substantially devoid of immunosuppressive properties.

[0355] In another particular embodiment, the invention relates to a pharmaceutical composition, as defined above, wherein said nucleic acid molecule coding for a mutated human or simian lentiviral ENV protein, or a fragment of said mutated human or simian lentiviral ENV protein, is contained in the same vector as the one which also contains a nucleic acid molecule coding for a GAG protein and for a mutated NEF protein, wherein said mutated NEF protein is substantially devoid of immunosuppressive properties.

[0356] In another particular embodiment, the invention relates to a pharmaceutical composition, as defined above, wherein said nucleic acid molecule coding for a mutated human or simian lentiviral ENV protein, or a fragment of said mutated human or simian lentiviral ENV protein, is contained in the same vector as the one which also contains a nucleic acid molecule coding for a GAG protein and for a mutated NEF protein, wherein said mutated NEF protein is substantially devoid of immunosuppressive properties,

said vector being preferably a measles vector (Guerbois et al., Virology, 388:191-203, 2009) or a canary pox vector (Poulet et al., Veterinary Record, 153(5):141-145, 2003; Vaccari et al., Expert Review of Vaccines, Vol. 9, No 9, pages 997-1005, 2010).

[0357] In another particular embodiment, the invention relates to a pharmaceutical composition, as defined above, wherein said nucleic acid molecule coding for a mutated human or simian lentiviral ENV protein, or a fragment of said mutated human or simian lentiviral ENV protein, is contained in a vector which is different from the at least one vector containing said at least one nucleic acid molecule coding for a GAG protein and/or a mutated NEF protein, wherein said mutated NEF protein is substantially devoid of immunosuppressive properties.

[0358] In another particular embodiment, the invention relates to a pharmaceutical composition, as defined above, wherein said nucleic acid molecule coding for a mutated human or simian lentiviral ENV protein, or a fragment of said mutated human or simian lentiviral ENV protein, said nucleic acid molecule coding for a GAG protein and said nucleic acid molecule coding for a mutated NEF protein substantially devoid of immunosuppressive properties, are all contained in vectors which are different from each other.

[0359] The invention also relates to a pharmaceutical composition according the above definition, for its use as vaccine, for the treatment or the prevention of lentiviral infection, in particular HIV-1 infection, HIV-2 infection and SIV infection.

[0360] As mentioned above the pharmaceutical composition according to the invention encompasses a vaccine, comprising as active substance, a protein as defined above, or a nucleic acid as defined above, or a vector as defined above, or a combination thereof.

[0361] In a particular embodiment, the pharmaceutical composition according to the invention encompasses a vaccine, comprising a nucleic acid coding for a GAG protein as defined above, a nucleic acid coding for a mutated ENV protein as defined above and a nucleic acid coding for a mutated NEF protein as defined above.

[0362] In a particular embodiment, the pharmaceutical composition according to the invention encompasses a vaccine as defined above, comprising a nucleic acid coding for a GAG protein as defined above, a nucleic acid coding for a mutated ENV protein as defined above and a nucleic acid coding for a mutated NEF protein as defined above, which are contained in a same vector, said same vector being preferably a canary pox vector or a measles vector, more preferably a measles vector.

[0363] In a particular embodiment, the pharmaceutical composition according to the invention encompasses a vaccine, comprising a GAG protein as defined above, a mutated ENV protein as defined above and a mutated NEF protein as defined above.

[0364] In a particular embodiment, the pharmaceutical composition according to the invention encompasses a vaccine, comprising a GAG protein as defined above, a mutated ENV protein as defined above and a mutated NEF protein as defined above which are associated to at least one adjuvant.

[0365] A comprehensive list of adjuvants that can be used in HIV vaccines is indicated in the FRANKLIN PIERCE LAW CENTER EDUCATIONAL REPORT: PATENT LANDSCAPE OF ADJUVANT FOR HIV VACCINES which is incorporated herein by reference. This list includes:
[0366] Aluminum-based compounds such as aluminum phosphate and aluminum hydroxide.
[0367] Immunostimulatory adjuvants like CpG, MPL and QS21 or MF59 which is a squalene oil-in water emulsions.
[0368] Freunds incomplete adjuvant (HA) or Freund's complete adjuvant (FCA), can also be used.
[0369] Calcium phosphate in particular orthophosphates, metaphosphates or pyrophosphates and occasionally hydrogen or hydroxide ions.
[0370] Muramyl dipeptide (N-Acetyl muramyl-L-alanine-D-isoglutamine, MDP) and its synthetic analogs such as muramyl tripeptide phosphatidylethanolamine MTPPTdEtn),
[0371] Trehalose-6,6′-dimycolate,
[0372] Saponins (Triterpenoid glycosides) like QS-21
[0373] Stearyl Tyrosine (octadecyl ester hydrochloride salt of tyrosine) 0.107

[0374] Immunostimulatory adjuvants can include the following classes of compounds:
[0375] Polysaccharides like:
   [0376] Chitosan:
   [0377] Inulin:
   [0378] Beta-Glucans
   [0379] Lipo-Polysaccharides or endotoxin
   [0380] MGN-3Actinidia eriantha (AEPS):
   [0381] Eldexomer:
   [0382] CpG ODN
[0383] Liposomes like
[0384] Dehydration-rehydration liposome vesicles (DRVs)
[0385] Cytotoxic T lymphocyte (CTL)
[0386] CAF01
[0387] Liposomes containing lipid A (LA)
[0388] Lipid Polysine Core Peptides (LCP)
[0389] Cytokine like GM-CSF, IL-2, IL-12 or IL-15
[0390] Lipid A and Monophosphoryl Lipid A (MPL)
[0391] Lipopeptide which are molecules consisting of lipid connected to a peptide. They are derived from the lipoprotein of bacterial cell wall.
[0392] Exogenous Immunostimulatory Adjuvants which are compounds, or proteins that are not found in the human body like:
   [0393] Proteosomes in particular Multiple Antigenic Peptides (MAP) or Exogenous Toxins

[0394] Suitably, the total amount mutated lentiviral ENV protein in a single dose of the immunogenic composition is Mpg and/or the total amount of unfused polypeptide in a single dose of the immunogenic composition is 20 μg. In one embodiment, the total amount of all antigens in a single dose of the immunogenic composition is 0.5-50 μg, 2-40 μg, 5-30 μg, 10μ-20 μg or around 30 μg, around 20 μg or around 10 μg.

[0395] The amount of mutated lentiviral ENV protein in a dose of the immunogenic composition is selected as an amount which induces an immune response without significant, adverse side effects in typical recipients. Such amount will vary depending upon which specific immunogen is employed and the dosing or vaccination regimen that is selected. An optimal amount for a particular immunogenic composition can be ascertained by standard studies involving observation of relevant immune responses in subjects.

[0396] Administration of the pharmaceutical composition can take the form of one or of more than one individual dose, for example as repeat doses of the same polypeptide containing composition, or in a heterologous “prime-boost” vaccination regime, including proteins and vectors. In one embodiment, the immunogenic composition of the invention is initially administered to a subject as two or three doses, wherein the doses are separated by a period of two weeks to three months, preferably one month.

[0397] Conveniently, the composition is administered to a subject (for instance as a booster) every 6-24, or 9-18 months, for instance annually. For instance, the composition is administered to a subject (for instance as a booster) at six month or 1 year intervals. Suitably in this respect, subsequent administrations of the composition to the subject boost the immune response of earlier administrations of the composition to the same subject.

[0398] In an embodiment, the immunogenic composition of the invention is used as part of a prime-boost regimen for use in the treatment or prevention of disease or infection by HIV-1 strains from one or more clades different from the one or more HIV-1 clades in the immunogenic composition. Conveniently, the composition is the priming dose. Alternatively, the composition is the boosting dose. Suitably, two or more priming and/or boosting doses are administered. A heterologous prime-boost regime uses administration of different forms of immunogenic composition or vaccine in the prime and the boost, each of which can itself include two or more administrations. The priming composition and the boosting composition will have at least one antigen in common, although it is not necessarily an identical form of the antigen, it can be a different form of the same antigen.

[0399] Prime boost immunisations according to the invention can be homologous prime-boost regimes or heterologous prime-boost regimes. Homologous prime-boost regimes utilize the same composition for prime and boost, for instance the immunogenic composition of the invention. Heterologous prime-boost regimes can be performed with a combination of protein and DNA-based formulations. Such a strategy is considered to be effective in inducing broad immune responses. Adjuvanted protein vaccines induce mainly antibodies and CD4+ T cell immune responses, while delivery of DNA as a plasmid or a recombinant vector induces strong CD8+ T cell responses. Thus, the combination of protein and DNA vaccination can provide for a wide variety of immune responses. This is particularly relevant in the context of HIV, since neutralizing antibodies, CD4+ T cells and CD8+ T cells are thought to be important for the immune defense against HIV-1.

[0400] The invention also relates to a pharmaceutical composition according the above definition, for its use for the treatment of lentiviral infection.

[0401] The invention also relates to a method for treating patient afflicted by pathologies related to lentiviral infection, comprising the administration to a patient in a need thereof of a pharmaceutically efficient amount of the pharmaceutical composition as defined above.

[0402] The invention also relates to a method for inducing an immune response against a lentivirus that has infected an individual, said method comprising the administration to a patient in a need thereof of a pharmaceutically efficient amount of the pharmaceutical composition as defined above.

[0403] The invention also relates to a pharmaceutical composition as defined above, further comprising an antiviral agent.

[0404] The composition according to the invention can also be used in combination with the antiviral compositions listed in Table 1 below:

TABLE 1
Trade names of the different antivirals used for HIV treatment, as well as their specificity of action.

| | |
|---|---|
| Intelence ® (TMC 125/etravirine) Tibotec - | Non-nucleoside reverse transcriptase inhibitor |
| Agenerase ®(APV/amprenavir) GSK - | Protease inhibitor |
| Aptivus ®(TPV/tipranavir) Boehringer - | Protease inhibitor |
| Crixivan ®(IDV/indinavir) MSD - | Protease inhibitor |
| Invirase ®(SQV/saquinavir) Roche - | Protease inhibitor |
| Kaletra ®(LPV.r/lopinavir + ritonavir) Abbott | Protease inhibitor |
| Norvir ®(ritonavir) Abbott - | Protease inhibitor |
| Prezista ®(TMC 114/darunavir) Tibotec/Janssen-Cilag - | Protease inhibitor |
| Reyataz ®(ATZ/atazanavir) BMS - | Protease inhibitor |
| Telzir ®(APV/fosamprenavir) GSK - | Protease inhibitor |
| Viracept ®(nelfinavir) Roche - | Protease inhibitor |
| Fuzeon ®(T20/enfuvirtide) Roche - | Fusion inhibitor |
| Celsentri ®(maraviroc) Pfizer - | Entry inhibitor |
| Isentress ®(MK 0518/raltegravir) Merck - | Integrase inhibitor |
| Rescriptor ®(delavirdine) Agouron - | Non-nucleoside reverse transcriptase inhibitor |
| Sustiva ®(EFV/efavirenz) BMS - | Non-nucleoside reverse transcriptase inhibitor |
| Viramune ®(nevirapine) Boehringer - | Non-nucleoside reverse transcriptase inhibitor |
| Combivir ®(Retrovir ® + Epivir ®) GSK - | Nucleoside reverse transcriptase inhibitor |
| Emtriva ®(FTC, emtricitabine) Gilead - | Nucleoside reverse transcriptase inhibitor |
| Epivir ®(3TC, lamivudine) GSK - | Nucleoside reverse transcriptase inhibitor |
| Kivexa ®(Ziagen ® + Epivir ®) GSK - | Nucleoside reverse transcriptase inhibitor |
| Retrovir ®(AZT/zidovudine) QSK - | Nucleoside reverse transcriptase inhibitor |
| Trizivir ®(Retrovir ® + Epivir ® + Ziagen ®) GSK - | Nucleoside reverse transcriptase inhibitor |
| Videx ®(ddI/didanosine) BMS - | Nucleoside reverse transcriptase inhibitor |
| Viread ®(TDF/tenofovir) Gilead - | Nucleoside reverse transcriptase inhibitor |
| Zerit ®(d4T/stavudine) BMS - | Nucleoside reverse transcriptase inhibitor |
| Ziagen ®(ABC/abacavir) GSK - | Nucleoside reverse transcriptase inhibitor |
| Truvada ®(Emtriva ® + Viread ®) Gilead - | Nucleoside reverse transcriptase inhibitor |
| Atripla ®(Sustiva ® + Emtriva ® + Viread ®) BMS/GILEAD | Nucleoside and non-nucleoside reverse transcriptase inhibitor |

[0405] The invention also relates to a pharmaceutical composition as defined above, for simultaneous, separate or sequential use.

[0406] The invention relates to a pharmaceutical composition as defined above for its use for stimulating an immune response in a host organism.

[0407] The invention relates to a pharmaceutical composition as defined above for its use for inducing a specific immune response against the HIV ENV protein.

[0408] The invention relates to a pharmaceutical composition as defined above for its use for the prevention or the treatment of HIV infection, or pathologies related to AIDS.

[0409] The invention relates to a pharmaceutical composition as defined above, as a vaccine, for its use for inducing a specific immune response against the HIV ENV protein.

[0410] The invention relates to a pharmaceutical composition as defined above, as a vaccine, for its use for the prevention or the treatment of HIV infection, or pathologies related to AIDS.

[0411] In another aspect, the invention also relates to a method to obtain the active substance of a pharmaceutical composition, as defined above, consisting of modifying the immunosuppressive property of:

a wild-type human or simian lentiviral ENV protein,
or a fragment of said wild-type human or simian lentiviral ENV protein, said fragment comprising at least 40 amino acids,
said ENV protein or fragment thereof presenting a transmembrane subunit (TM) comprising an immunosuppressive domain (ISU) containing the following amino acid sequence:

| | |
|---|---|
| A-[I/V]-E-[K/R]-X′ₐ-X′_{b}-X-D-Q, | (SEQ ID NO: 427) |

wherein
X represents any amino acid,

### X′ₐ is C, D, E, H, I, K, M, N, P, Q, S, T, V, W or Y, and

### X′_{b} is C, D, E, H, I, K, L, M, N, P, Q, S, T, V, W or Y,

[0412] said method comprising a step of introduction of at least one mutation of X′ₐ and/or X′_{b},
to obtain:
an isolated mutated human or simian lentiviral ENV protein having substantially no immunosuppressive activity,
said mutated human or simian lentiviral ENV protein having at least 70% identity, preferably at least 80% identity, to one sequence chosen from the group consisting of SEQ ID NO: 216, SEQ ID NO: 420 and SEQ ID NO: 421,
or a fragment of said isolated mutated human or simian lentiviral ENV protein having substantially no immunosuppressive activity, said fragment comprising at least 40 amino acids,
said mutated ENV protein and fragment thereof comprising a mutated immunosuppressive domain (ISU) containing the following amino sequence:

| | |
|---|---|
| A-[I/V]-E-[K/R]-Xₐ-X_{b}-X-D-Q, | (SEQ ID NO: 416) |

wherein
X represents any amino acid,
and either
Xₐ is A, F, G, L, R or deleted, and X_{b} is C, D, E, H, I, K, L, M, N, P, Q, S, T, V, W or Y, or
Xₐ is C, D, E, H, I, K, M, N, P, Q, S, T, V, W or Y, and X_{b} is A, F, G, R or deleted, or
Xₐ is A, F, G, L, R or deleted, and X_{b} is A, F, G, R or deleted,
said substantial absence of immunosuppressive activity of the above mentioned mutated human or simian lentiviral ENV protein or of the above defined fragment being liable to be assessed by the fact that in an in vivo assay involving engrafted tumor cells rejection,
said tumor cells being transduced either so as to express said mutated ENV protein or said fragment (mutated ENV tumor cells),
or said tumor cells being transduced so as to express said wild type ENV protein or a fragment thereof (wild type ENV tumor cells),
or said tumor cells being not transduced (normal tumor cells), the following ratio:
immunosuppression index of said mutated ENV protein or of said fragment (i_{mutated env})/immunosuppression index of wild type ENV protein (i_{wild type env}) is less than 0.5,
i_{mutated env} being defined by: (maximum area reached by mutated ENV tumor cells−maximum area reached by normal tumor cells)/(maximum area reached by normal tumor cells), and
i_{wild type env} being defined by: (maximum area reached by wild type ENV tumor cells−maximum area reached by normal tumor cells)/(maximum area reached by normal tumor cells).

[0413] The invention also relates to a method to obtain a pharmaceutical composition wherein the active substance is an isolated non naturally occurring mutated human or simian lentiviral ENV protein having substantially no immunosuppressive activity, as above defined, or fragments thereof.

[0414] The invention also relates to a method to obtain the active substance of a pharmaceutical composition, according to the above defined method, consisting of modifying the immunosuppressive property of:

a wild-type human or simian lentiviral ENV protein,
or a fragment of said wild-type human or simian lentiviral ENV protein, said fragment comprising at least 40 amino acids,
said ENV protein or fragment thereof presenting a transmembrane subunit (TM) comprising an immunosuppressive domain (ISU) containing the following amino acid sequence:

| | |
|---|---|
| A-[I/V]-E-[K/R]-Y-L-X-D-Q, | (SEQ ID NO: 1) |

wherein
X represents any amino acid,
said method comprising a step of introduction of at least one mutation of Y in position 5 and/or L in position 6,
to obtain:
an isolated mutated human or simian lentiviral ENV protein having substantially no immunosuppressive activity,
or a fragment of said isolated mutated human or simian lentiviral ENV protein having substantially no immunosuppressive activity, said fragment comprising at least 40 amino acids,
said mutated ENV protein and fragment thereof comprising a mutated immunosuppressive domain (ISU) containing the following amino sequence:

| | |
|---|---|
| A-[I/V]-E-[K/R]-Xₐ-X_{b}-X-D-Q, | (SEQ ID NO: 416) |

wherein
X represents any amino acid,
and either
Xₐ is A, F, G, L, R or deleted, and X_{b} is C, D, E, H, I, K, L, M, N, P, Q, S, T, V, W or Y, or
Xₐ is C, D, E, H, I, K, M, N, P, Q, S, T, V, W or Y, and X_{b} is A, F, G, R or deleted, or
Xₐ is A, F, G, L, R or deleted, and X_{b} is A, F, G, R or deleted.

[0415] The invention also relates to a method as defined above to obtain the active substance of a pharmaceutical composition, wherein said isolated mutated human or simian lentiviral ENV protein having substantially no immunosuppressive activity, or a fragment of said isolated mutated human or simian lentiviral ENV protein having substantially no immunosuppressive activity, said fragment comprising at least 40 amino acids,

said mutated ENV protein and fragment thereof comprising a mutated immunosuppressive domain (ISU) containing the following amino sequence:

| | |
|---|---|
| A-[I/V]-E-[K/R]-Xₐ-X_{b}-X-D-Q, | (SEQ ID NO: 416) |

wherein
X represents any amino acid,
and either

### Xₐ is A, F, G, L or R, and X_{b} is C, D, E, H, I, K, L, M, N, P, Q, S, T, V, W or Y, or

### Xₐ is C, D, E, H, I, K, M, N, P, Q, S, T, V, W or Y, and X_{b} is A, F, G or R, or

### Xₐ is A, F, G, L or R, and X_{b} is A, F, G or R.

[0416] The invention also relates to a method as defined above to obtain the active substance of a pharmaceutical composition, said isolated mutated human or simian lentiviral ENV protein having substantially no immunosuppressive activity, or a fragment of said isolated mutated human or simian lentiviral ENV protein having substantially no immunosuppressive activity, said fragment comprising at least 40 amino acids,

said mutated ENV protein and fragment thereof comprising a mutated immunosuppressive domain (ISU) containing the following amino sequence:

| | |
|---|---|
| A-[I/V]-E-[K/R]-Xₐ-X_{b}-X-D-Q, | (SEQ ID NO: 416) |

wherein
X represents any amino acid,
and either

### Xₐ is A, F, G, L or R, and X_{b} is L, I, V, M or P, or

### Xₐ is Y, I, H, C or T, and X_{b} is A, F, G or R, or

### Xₐ is A, F, G, L or R, and X_{b} is A, F, G or R.

[0417] The invention also relates to a method as defined above to obtain the active substance of a pharmaceutical composition,

wherein said isolated mutated human or simian lentiviral ENV protein having substantially no immunosuppressive activity,
or a fragment of said isolated mutated human or simian lentiviral ENV protein having substantially no immunosuppressive activity, said fragment comprising at least 40 amino acids,
said mutated ENV protein and fragment thereof comprising a mutated immunosuppressive domain (ISU) containing the following amino sequence:

| | |
|---|---|
| A-[I/V]-E-[K/R]-Xₐ-X_{b}-X-D-Q, | (SEQ ID NO: 416) |

wherein
X represents any amino acid,
and either

### Xₐ is A, G, or R, and X_{b} is C, D, E, H, I, K, L, M, N, P, Q, S, T, V, W or Y, or

### Xₐ is C, D, E, H, I, K, M, N, P, Q, S, T, V, W or Y, and X_{b} is F, G or R, or

### Xₐ is F or L, and X_{b} is F, G or R, or

### Xₐ is A, G or R, and X_{b} is A.

[0418] The invention also relates to a method as defined above to obtain the active substance of a pharmaceutical composition,

wherein said isolated mutated human or simian lentiviral ENV protein having substantially no immunosuppressive activity,
or a fragment of said isolated mutated human or simian lentiviral ENV protein having substantially no immunosuppressive activity, said fragment comprising at least 40 amino acids,
said mutated ENV protein and fragment thereof comprising a mutated immunosuppressive domain (ISU) containing the following amino sequence:

| | |
|---|---|
| A-[I/V]-E-[K/R]-Xₐ-X_{b}-X-D-Q, | (SEQ ID NO: 416) |

wherein
X represents any amino acid,
and either

### Xₐ is A, G, or R, and X_{b} is L, I, V, M or P, or

### Xₐ is Y, I, H, C or T, and X_{b} is F, G or R, or

### Xₐ is F or L, and X_{b} is F, G or R, or

### Xₐ is A, G or R, and X_{b} is A, or

### Xₐ is A, G or R, and X_{b} is F, G or R.

[0419] The invention also relates to a method as defined above to obtain the active substance of a pharmaceutical composition,

wherein said isolated mutated human or simian lentiviral ENV protein having substantially no immunosuppressive activity,
or a fragment of said isolated mutated human or simian lentiviral ENV protein having substantially no immunosuppressive activity, said fragment comprising at least 40 amino acids,
said mutated ENV protein and fragment thereof comprising a mutated immunosuppressive domain (ISU) containing the following amino sequence:

| | |
|---|---|
| A-[I/V]-E-[K/R]-Xₐ-X_{b}-X-D-Q, | (SEQ ID NO: 416) |

wherein,
X represents any amino acid,
and either

### Xₐ is A, G, or R, and X_{b} is C, D, E, H, I, K, L, M, N, P, Q, S, T, V, W or Y, or

### Xₐ is C, D, E, H, I, K, M, N, P, Q, S, T, V, W or Y, and X_{b} is F, G or R.

[0420] The invention also relates to a method as defined above to obtain the active substance of a pharmaceutical composition,

wherein said isolated mutated human or simian lentiviral ENV protein having substantially no immunosuppressive activity,
or a fragment of said isolated mutated human or simian lentiviral ENV protein having substantially no immunosuppressive activity, said fragment comprising at least 40 amino acids,
said mutated ENV protein and fragment thereof comprising a mutated immunosuppressive domain (ISU) containing the following amino sequence:

| | |
|---|---|
| A-[I/V]-E-[K/R]-Xₐ-X_{b}-X-D-Q, | (SEQ ID NO: 416) |

wherein,
X represents any amino acid,
and either

### Xₐ is A, G, or R, and X_{b} is L, I, V, M or P, or

### Xₐ is Y, I, H, C or T, and X_{b} is F, G or R.

[0421] The invention also relates to a method as defined above to obtain the active substance of a pharmaceutical composition,

wherein said isolated mutated human or simian lentiviral ENV protein having substantially no immunosuppressive activity,
or a fragment of said isolated mutated human or simian lentiviral ENV protein having substantially no immunosuppressive activity, said fragment comprising at least 40 amino acids,
said mutated ENV protein and fragment thereof comprising a mutated immunosuppressive domain (ISU) containing the following amino sequence:

| | |
|---|---|
| A-[I/V]-E-[K/R]-Xₐ-X_{b}-X-D-Q, | (SEQ ID NO: 416) |

wherein,
X represents any amino acid,
and either

### Xₐ is R, and X_{b} is C, D, E, H, I, K, L, M, N, P, Q, S, T, V, W or Y, or

### Xₐ is C, D, E, H, I, K, M, N, P, Q, S, T, V, W or Y, and X_{b} is R, or

### Xₐ is R, and X_{b} is R.

[0422] The invention also relates to a method as defined above to obtain the active substance of a pharmaceutical composition,

wherein said isolated mutated human or simian lentiviral ENV protein having substantially no immunosuppressive activity,
or a fragment of said isolated mutated human or simian lentiviral ENV protein having substantially no immunosuppressive activity, said fragment comprising at least 40 amino acids,
said mutated ENV protein and fragment thereof comprising a mutation in one at least of the amino acids at positions, 29, 36 and 37 of SEQ ID NO: 426:

(SEQ ID NO: 426)

A[I/V]E[K/R]XₐX_{b}X₁DQX₂X₃LX₄X₅WGC[A/S]
[F/G]X₆X₇CVX₈TX₉VPX_{c}X₁₀Z₁Z₂Z₃Z₄Z₅X_{d}Xₑ[S/T]

wherein
Xₐ and X_{b} are as defined in anyone of claims 1 to 15,
X₁ to X₁₀ represent any amino acid,
Z₁ to Z₅ represent no amino acid or any amino acid, independently from each other
such that
[0423] X_{c} is A, C, D, E, F, G, H, I, K, L, M, N, P, Q, R, S, T, V, Y, or deleted, preferably A, D, or N,
[0424] X_{d} is A, C, D, E, F, G, H, I, L, M, N, P, Q, R, S, T, V, Y, W, or deleted, preferably A, G, S or Y,
[0425] Xₑ is A, C, D, E, F, G, H, I, K, L, M, N, P, Q, R, T, V, Y, W, or deleted, preferably A, D or N.

[0426] The present invention relates to a pharmaceutical composition comprising as active substance:

a) an isolated non naturally occurring mutated human or simian lentiviral ENV having substantially no immunosuppressive activity, said mutated human or simian lentiviral ENV resulting from mutation of the transmembrane subunit (TM) of a wild type human or simian lentiviral ENV protein, the transmembrane subunit comprising an immunosuppressive domain (ISU) comprising the following amino acid sequence:

| | |
|---|---|
| A-[I/V]-E-[K/R]-Y-L-X-D-Q, | (SEQ ID NO: 1) |

said sequence encompassing
[0427] AIEKYLXDQ (SEQ ID NO: 2), AIERYLXDQ (SEQ ID NO: 3), AVEKYLXDQ (SEQ ID NO: 4) and AVERYLXDQ (SEQ ID NO: 5),
   wherein X represents any natural amino acid,
   wherein the amino acids at the positions chosen among
[0428] the position 4 of SEQ ID NO: 1,
[0429] the position 5 of SEQ ID NO: 1,
[0430] the position 6 of SEQ ID NO: 1,
[0431] the positions 4 and 5 of SEQ ID NO: 1,
[0432] the position 4 and 6 of SEQ ID NO: 1,
[0433] the position 5 and 6 of SEQ ID NO: 1, and
[0434] the position 4, 5 and 6 of SEQ ID NO: 1,
   are:
[0435] either deleted,
[0436] or substituted by another amino acid such that
   [0437] when the immunosuppressive domain comprises SEQ ID NO: 2 or 4
      [0438] the amino acid residue at position 4 of SEQ ID NO: 1 is substituted by A, C, D, E, F, G, H, I, L, M, N, P, Q, R, S, T, V, W or Y, and/or
      [0439] the amino acid residue at position 5 of SEQ ID NO: 1 is substituted by A, C, D, E, F, G, I, L, M, N, P, Q, R, S, T, V or W, and/or
      [0440] the amino acid residue at position 6 of SEQ ID NO: 1 is substituted by A, C, D, E, F, G, H, I, K, M, N, P, Q, R, S, T, V, W or Y,
   [0441] when the immunosuppressive domain comprises SEQ ID NO: 3 or 5,
      [0442] the amino acid residue at position 4 of SEQ ID NO: 1 is substituted by A, C, D, E, F, G, H, I, K, L, M, N, P, Q, S, T, V, W or Y, and/or
      [0443] the amino acid residue at position 5 of SEQ ID NO: 1 is substituted by A, C, D, E, F, G, I, L, M, N, P, Q, R, S, T, V or W, and/or
      [0444] the amino acid residue at position 6 of SEQ ID NO: 1 is substituted by A, C, D, E, F, G, H, I, K, M, N, P, Q, R, S, T, V, W or Y,
         or
         b) a fragment of said mutated human or simian lentiviral ENV, said fragment comprising at least the immunosuppressive domain (ISU) of said wild type human or simian lentiviral ENV comprising the following amino acid sequence:

| | |
|---|---|
| A-[I/V]-E-[K/R]-Y-L-X-D-Q, | (SEQ ID NO: 1) |

wherein the amino acids at the positions chosen among
[0445] the position 4 of SEQ ID NO: 1,
[0446] the position 5 of SEQ ID NO: 1,
[0447] the position 6 of SEQ ID NO: 1,
[0448] the positions 4 and 5 of SEQ ID NO: 1,
[0449] the position 4 and 6 of SEQ ID NO: 1,
[0450] the position 5 and 6 of SEQ ID NO: 1, and
[0451] the position 4, 5 and 6 of SEQ ID NO: 1,
   are:
[0452] either deleted,
[0453] or substituted by another amino acid such that
   [0454] when the immunosuppressive domain comprises SEQ ID NO: 2 or 4
      [0455] the amino acid residue at position 4 of SEQ ID NO: 1 is substituted by A, C, D, E, F, G, H, I, L, M, N, P, Q, R, S, T, V, W or Y, and/or
      [0456] the amino acid residue at position 5 of SEQ ID NO: 1 is substituted by A, C, D, E, F, G, I, L, M, N, P, Q, R, S, T, V or W, and/or
      [0457] the amino acid residue at position 6 of SEQ ID NO: 1 is substituted by A, C, D, E, F, G, H, I, K, M, N, P, Q, R, S, T, V, W or Y,
   [0458] when the immunosuppressive domain comprises SEQ ID NO: 3 or 5,
      [0459] the amino acid residue at position 4 of SEQ ID NO: 1 is substituted by A, C, D, E, F, G, H, I, K, L, M, N, P, Q, S, T, V, W or Y, and/or
      [0460] the amino acid residue at position 5 of SEQ ID NO: 1 is substituted by A, C, D, E, F, G, I, L, M, N, P, Q, R, S, T, V or W, and/or
      [0461] the amino acid residue at position 6 of SEQ ID NO: 1 is substituted by A, C, D, E, F, G, H, I, K, M, N, P, Q, R, S, T, V, W or Y,
         said fragment having substantially no immunosuppressive properties,
         in association of a pharmaceutically acceptable carrier.

[0462] In one advantageous embodiment, the invention relates to a pharmaceutical composition as defined above, wherein the amino acids at the positions of the group consisting of
[0463] the position 4 of SEQ ID NO: 1,
[0464] the position 5 of SEQ ID NO: 1,
[0465] the position 6 of SEQ ID NO: 1,
[0466] the positions 4 and 5 of SEQ ID NO: 1,
[0467] the position 4 and 6 of SEQ ID NO: 1,
[0468] the position 5 and 6 of SEQ ID NO: 1, and
[0469] the position 4, 5 and 6 of SEQ ID NO: 1,
   [0470] are substituted by another amino acid such that
      [0471] when the immunosuppressive domain comprises SEQ ID NO: 2 or 4
         [0472] the amino acid residue at position 4 of SEQ ID NO: 1 is substituted by A, C, D, E, F, G, H, I, L, M, N, P, Q, R, S, T, V, W or Y, and/or
         [0473] the amino acid residue at position 5 of SEQ ID NO: 1 is substituted by A, C, D, E, F, G, I, L, M, N, P, Q, R, S, T, V or W, and/or
         [0474] the amino acid residue at position 6 of SEQ ID NO: 1 is substituted by A, C, D, E, F, G, H, I, K, M, N, P, Q, R, S, T, V, W or Y,
      [0475] when the immunosuppressive domain comprises SEQ ID NO: 3 or 5,
         [0476] the amino acid residue at position 4 of SEQ ID NO: 1 is substituted by A, C, D, E, F, G, H, I, K, L, M, N, P, Q, S, T, V, W or Y, and/or
         [0477] the amino acid residue at position 5 of SEQ ID NO: 1 is substituted by A, C, D, E, F, G, I, L, M, N, P, Q, R, S, T, V or W, and/or
         [0478] the amino acid residue at position 6 of SEQ ID NO: 1 is substituted by A, C, D, E, F, G, H, I, K, M, N, P, Q, R, S, T, V, W or Y.

[0479] Advantageously, the mutated lentiviral protein according to the invention, comprised in the above defined composition, comprises the amino acid sequence of the list consisting of: SEQ ID NO: 407 to SEQ ID NO: 414.

[0480] The correspondence is the following one:

| | |
|---|---|
| AVEAALKD | SEQ ID NO: 407 |
| AVEEALKD | SEQ ID NO: 408 |
| AVESALKD | SEQ ID NO: 409 |
| AVETALKD | SEQ ID NO: 410 |
| AIEAALKD | SEQ ID NO: 411 |
| AIEEALKD | SEQ ID NO: 412 |
| AIESALKD | SEQ ID NO: 413 |
| AIETALKD | SEQ ID NO: 414 |

[0481] These proteins have been mutated at position 4 of SEQ ID NO: 1, by substitution, and the amino acid at position 5 has been substituted by A.

[0482] In one advantageous embodiment, the invention relates to a pharmaceutical composition as defined above, wherein the amino acids at the positions of the group consisting of
[0483] the position 5 of SEQ ID NO: 1,
[0484] the position 6 of SEQ ID NO: 1, and
[0485] the position 5 and 6 of SEQ ID NO: 1,
   [0486] are substituted by another amino acid such that
      [0487] the amino acid residue at position 5 of SEQ ID NO: 1 is substituted by A, C, D, E, F, G, I, L, M, N, P, Q, R, S, T, V or W, and/or
      [0488] the amino acid residue at position 6 of SEQ ID NO: 1 is substituted by A, C, D, E, F, G, H, I, K, M, N, P, Q, R, S, T, V, W or Y.

[0489] In one advantageous embodiment, the invention relates to a pharmaceutical composition as defined above, wherein said immunosuppressive domain (ISU) comprises the amino acid sequence of the group consisting of: SEQ ID NO: 4 or 5.

[0490] In one advantageous embodiment, the invention relates to a pharmaceutical composition as defined above, wherein said immunosuppressive domain (ISU) comprises the amino acid sequence SEQ ID NO: 5, and wherein
[0491] the amino acid residue at position 5 of SEQ ID NO: 5 is substituted by A, F, G, L or R, or
[0492] the amino acid residue at position 6 of SEQ ID NO: 5 is substituted by A, F, G or R, or
[0493] the amino acid residues at position 5 and 6 of SEQ ID NO: 5 are substituted by A, F, G, or R.
   This is the case when said ENV protein is the ENV protein of HIV 1 virus.

[0494] The invention also relates to a pharmaceutical composition as defined above, wherein said immunosuppressive domain (ISU) comprises the amino acid sequence SEQ ID NO: 2, and wherein
[0495] the amino acid residue at position 5 of SEQ ID NO: 2 is substituted by A, F, G, L or R, or
[0496] the amino acid residue at position 6 of SEQ ID NO: 2 is substituted by A, F, G or R, or
[0497] the amino acid residues at position 5 and 6 of SEQ ID NO: 2 are substituted by A, F, G, or R.

[0498] The invention also relates to a pharmaceutical composition as defined above, wherein said immunosuppressive domain (ISU) comprises the amino acid sequence SEQ ID NO: 3, and wherein
[0499] the amino acid residue at position 5 of SEQ ID NO: 3 is substituted by A, F, G, L or R, or
[0500] the amino acid residue at position 6 of SEQ ID NO: 3 is substituted by A, F, G or R, or
[0501] the amino acid residues at position 5 and 6 of SEQ ID NO: 3 are substituted by A, F, G, or R.

[0502] In one advantageous embodiment, the invention relates to a pharmaceutical composition as defined above, wherein said mutated protein further comprises the wild type amino acid sequence SEQ ID NO: 270,

(SEQ ID NO: 270)

X₁DQX₂X₃LX₄X₅WGC[A/S][F/G]X₆X₇CVX₈TX₉VPWX₁₀Z₁Z₂
Z₃Z₄Z₅[N/S][E/D/N/A][S/T]

wherein X₁-X₁₀ represents any amino acid,
wherein Z₁ to Z₅ represent no amino acid or any natural amino acid, independently from each other,
said mutated lentiviral protein further comprising a mutation in one at least of the amino acids at positions 23, 30 and 31 of SEQ ID NO: 270
[0503] said mutation being:
   [0504] either a deletion,
   [0505] or a substitution such that
      [0506] the amino acid at position 25 of SEQ ID NO: 270 is substituted by A, C, D, E, F, G, H, I, K, L, M, N, P, Q, R, S, T, V, Y,
      [0507] the amino acid at position 32 of SEQ ID NO: 270 is substituted by A, C, D, E, F, G, H, I, K, L, M, P, Q, R, T, V, Y, W,
      [0508] the amino acid at position 33 of SEQ ID NO: 270 is substituted by C, F, G, H, I, K, L, M, P, Q, R, S, T, V, Y, W.

[0509] In one advantageous embodiment, the invention relates to a pharmaceutical composition comprising as active substance:

an isolated non naturally occurring mutated human or simian lentiviral ENV having substantially no immunosuppressive activity, said mutated human or simian lentiviral ENV resulting from mutation of a wild type human or simian lentiviral ENV protein, said wild type human or simian lentiviral ENV protein comprising the following amino acid sequence:

(SEQ ID NO: 415)

A[I/V]E[K/R]YLX₁DQX₂X₃LX₄X₅WGC[A/S][F/G]X₆X₇CVX₈
TX₉VPWX₁₀Z₁Z₂Z₃Z₄Z₅[N/S][E/D/N/A][S/T],

wherein X₁-X₁₀ represents any amino acid,
wherein Z₁ to Z₅ represent no amino acid or any natural amino acid, independently from each other,
wherein the amino acids at the positions chosen among
[0510] the position 4 of SEQ ID NO: 1,
[0511] the position 5 of SEQ ID NO: 1,
[0512] the position 6 of SEQ ID NO: 1,
[0513] the positions 4 and 5 of SEQ ID NO: 1,
[0514] the position 4 and 6 of SEQ ID NO: 1,
[0515] the position 5 and 6 of SEQ ID NO: 1, and
[0516] the position 4, 5 and 6 of SEQ ID NO: 1,
   are:
[0517] either deleted,
[0518] or substituted by another amino acid such that
   [0519] the amino acid residue at position 4 of SEQ ID NO: 1 is substituted by A, C, D, E, F, G, H, I, L, M, N, P, Q, S, T, V, W or Y, and/or
   [0520] the amino acid residue at position 5 of SEQ ID NO: 1 is substituted by A, C, D, E, F, G, I, L, M, N, P, Q, R, S, T, V or W, and/or
   [0521] the amino acid residue at position 6 of SEQ ID NO: 1 is substituted by A, C, D, E, F, G, H, I, K, M, N, P, Q, R, S, T, V, W or Y,
      and further wherein
      one at least of the amino acids at positions 29, 36 and 37 of the amino acid sequence SEQ ID NO: 415 are mutated, by
[0522] either a deletion,
[0523] or a substitution such that
   [0524] the amino acid at position 29 of SEQ ID NO: 415 is substituted by A, C, D, E, F, G, H, I, K, L, M, N, P, Q, R, S, T, V, Y,
   [0525] the amino acid at position 36 of SEQ ID NO: 415 is substituted by A, C, D, E, F, G, H, I, K, L, M, P, Q, R, T, V, Y, W,
   [0526] the amino acid at position 37 of SEQ ID NO: 415 is substituted by C, F, G, H, I, K, L, M, P, Q, R, S, T, V, Y, W.

[0527] In another aspect, the invention relates to a pharmaceutical composition as defined above, further comprising a mutation at the position X₄

(SEQ ID NO: 270)

X₁DQX₂X₃LX₄X₅WGC[A/S][F/G]X₆X₇CVX₈TX₉VPWX₁₀Z₁Z₂Z₃
Z₄Z₅[N/S][E/D/N/A][S/T]

wherein X₁-X₃ and X₅-X₁₀ represents any amino acid,
Z₁ to Z₅ represent no amino acid or any amino acid, independently from each other
[0528] said mutation being:
   [0529] either a deletion,
   [0530] or a substitution by A, C, D, E, F, H, I, K, L, M, P, Q, R, S, T, V, Y or W.

[0531] In one advantageous embodiment, the invention relates to a pharmaceutical composition comprising as active substance:

an isolated non naturally occurring mutated human or simian lentiviral ENV having substantially no immunosuppressive activity, said mutated human or simian lentiviral ENV resulting from mutation of a wild type human or simian lentiviral ENV protein, said wild type human or simian lentiviral ENV protein comprising the following amino acid sequence:

(SEQ ID NO: 415)

A[I/V]E[K/R]YLX₁DQX₂X₃LX₄X₅WGC[A/S][F/G]X₆X₇CVX₈
TX₉VPWX₁₀Z₁Z₂Z₃Z₄Z₅[N/S][E/D/N/A][S/T],

wherein X₁-X₁₀ represents any amino acid,
wherein Z₁ to Z₅ represent no amino acid or any natural amino acid, independently from each other,
wherein the amino acids at the positions chosen among
[0532] the position 4 of SEQ ID NO: 1,
[0533] the position 5 of SEQ ID NO: 1,
[0534] the position 6 of SEQ ID NO: 1,
[0535] the positions 4 and 5 of SEQ ID NO: 1,
[0536] the position 4 and 6 of SEQ ID NO: 1,
[0537] the position 5 and 6 of SEQ ID NO: 1, and
[0538] the position 4, 5 and 6 of SEQ ID NO: 1,
   are:
[0539] either deleted,
[0540] or substituted by another amino acid such that
   [0541] the amino acid residue at position 4 of SEQ ID NO: 1 is substituted by A, C, D, E, F, G, H, I, L, M, N, P, Q, S, T, V, W or Y, and/or
   [0542] the amino acid residue at position 5 of SEQ ID NO: 1 is substituted by A, C, D, E, F, G, I, L, M, N, P, Q, R, S, T, V or W, and/or
   [0543] the amino acid residue at position 6 of SEQ ID NO: 1 is substituted by A, C, D, E, F, G, H, I, K, M, N, P, Q, R, S, T, V, W or Y,
      and possibly, further wherein
      one at least of the amino acids at positions 29, 36 and 37 of the amino acid sequence SEQ ID NO: 415 are mutated, by
[0544] either a deletion,
[0545] or a substitution such that
   [0546] the amino acid at position 29 of SEQ ID NO: 415 is substituted by A, C, D, E, F, G, H, I, K, L, M, N, P, Q, R, S, T, V, Y,
   [0547] the amino acid at position 36 of SEQ ID NO: 415 is substituted by A, C, D, E, F, G, H, I, K, L, M, P, Q, R, T, V, Y, W,
   [0548] the amino acid at position 37 of SEQ ID NO: 415 is substituted by C, F, G, H, I, K, L, M, P, Q, R, S, T, V, Y, W,
      and/or possibly further wherein the amino acid at position X₄ is either deleted or substituted by A, C, D, E, F, H, I, K, L, M, P, Q, R, S, T, V, Y or W, preferably by R or H.

### LEGEND TO THE FIGURES

[0549] FIG. 1:

[0550] Amino acid sequences of the HIV ectodomain deletants, with the indicated length, and of single mutant (substitution are underlined) ectodomains.

[0551] FIG. 2:

[0552] Functional delineation of the immunosuppressive domain of the HIV envelope. The immunosuppressive activity of 115aa-long and truncated HIV envelope ectodomains (see structures on the left) was tested using the MCA205 tumor rejection in vivo assay. Immunosuppression indexes are given as histograms on the right (mean values+/−SD).

[0553] FIG. 3:

[0554] Functional identification of the aminoacid in the HIV envelope ectodomain directly involved in immunosuppressive activity, and search for aminoacid substitutions inhibiting this activity. Immunosuppresive activity was tested in vivo as in FIG. 2.

[0555] FIG. 4:

[0556] Expression profile of mutated HIV envelopes using full-length HIVenv-expressing vectors and an anti-SU HIVenv(110H) monoclonal antibody (FACS). The data are expressed as percentages of the control HIVenv WT.

[0557] FIG. 5:

[0558] Infectivity of HIVenv-pseudotyped viral particles showing functionality of the full-length WT and of specifically mutated HIV envelopes. The results are expressed as viral titers (number of infected target cells/mL of virus supernatant).

[0559] FIG. 6:

[0560] Functional identification of the amino acid in the SIV envelope ectodomain directly involved in immunosuppressive activity, and search for aminoacid substitutions inhibiting this activity. Immunosuppressive activity was tested using the in vivo MCA205 tumor rejection assay. Immunosuppression indexes are represented as histograms (mean values+/−SD).

### EXAMPLE

[0561] Immunosuppressive domains have been identified on the envelope proteins of oncoretroviruses, of either the gamma- (murine MLV) or the delta (e.g. human HTLV) type, as well as of some endogenous retroviruses (e.g. HERV-FRD). These domains have a highly conserved crystallographic structure, although their primary sequences are quite diverse, and an amino-acid (either Q, E, or K) at a definite position has previously been demonstrated to be essential for the immunosuppresive activity of the corresponding envelope protein. Mutation of this amino acid to an Arginine (R) was further demonstrated to result in inhibition of the immunosuppressive activity of the mutated envelope protein, with in some cases complete conservation of the other functional properties of the envelope protein, including its ability to be normally expressed at the cell membrane, to be captured by a nascent retroviral particle, and finally to confer infectivity of the mutant virus in vitro. Such mutants allowed an unambiguous demonstration of the essential role of the immunosuppressive activity for viremia in vivo, with the mutant IS-virus being unable to escape the host immune system and propagate in an immunocompetent animal [Schlecht-Louf et al., Proc Natl Acad Sci USA. 2010; 107(8):3782-7].

[0562] On the basis of the identification of an IS domain and on the ability of the IS function to be inhibited by specific mutations within the IS domain that do not disrupt the antigenic structure of the corresponding viral protein, vaccinal approaches are being developed with vaccines containing mutated <<optimized>> IS-negative viral antigens, which demonstrate an increased immunognicity as compared to those using the native viral antigens. Search for similar IS domains and appropriate mutations in the case of non-oncogenic—but still pathogenic-retroviruses such as HIV is therefore of interest to tentatively develop improved vaccines.

[0563] Actually, in the case of the other major class of retroviruses, namely the lentiviruses (among which the human HIV1 and HIV2, and the SIV simian homologues), the crystallographic structure of the envelope protein discloses some similarities but also very important differences, especially in the domain corresponding to the IS domain of oncoretroviruses, with evidence in HIV and SIV for a severely extended helix-loop-helix domain, and no evidence for sequence similarities with the IS domain of oncoretroviruses. Furthermore, an IS domain with strong amino-acid similarities with the IS domain of oncoretroviruses was identified within an accessory protein of HIV and SIV, namely within the Nef protein. This protein is specifically produced by these complex retroviruses and is not encoded by oncoretroviruses. The Nef protein is essential for viremia in vivo, and it possesses several domains responsible for immune escape, among which the identified IS domain, thus strongly suggesting that lentiviruses had transferred the immunosuppressive activity found in oncoretroviruses within their envelope protein, to the accessory Nef protein. In agreement with this hypothesis, Nef-deleted or Nef-mutated retroviruses have a severely attenuated pathogenicity in in vivo macaque animal models.

[0564] Here, the Inventors report on the identification of an IS activity carried by the HIV and SIV envelope proteins, and on specific mutations that inhibit this activity without major disrupt ion of the overall structure of the corresponding envelope proteins.

### Results

### Delination of the Immunosuppressive Domain of the HIV Envelope

[0565] Delineation of the immunosuppressive domain of the HIV envelope was achieved using an in vivo tumor rejection assay, that the Inventors had previously used to demonstrate the immunosuppressive activity of the Env protein of oncoretroviruses (murine MoMLV and simian MPMV). The rationale of the assay can be summarized as follows: while injection of MCA205 tumor cells (H-2^{b}) into allogeneic Balb/c mice (H-2^{d}) leads to the formation of no tumor or transient tumors that are rapidly rejected, injection of the same cells, but stably expressing an immunosuppressive retroviral Env protein, leads to the growth of larger tumors that persist for a longer time—in spite of the expression of the new exogenous antigen. This difference is not associated with a difference in intrinsic cell growth rate since it is not observed in syngeneic C57BL/6 mice, and is immune system-dependent. The extent of “immunosuppression” can be quantified by an index based on tumor size: (Aₑₙᵥ-Aₙₒₙₑ)/Aₙₒₙₑ, where Aₑₙᵥ and Aₙₒₙₑ are the mean areas at the peak of growth of tumors from Balb/c mice injected with env-expressing or control cells, respectively. A positive index indicates that env expression facilitates tumor growth, as a consequence of its immunosuppressive activity; a null or negative index points to no effect or even an inhibitory effect, respectively. The latter may be explained by a stimulation of the immune response of the host against the new foreign antigen, represented by a non-immunosuppressive Env protein, expressed at the surface of tumor cells.

[0566] To first delineate a minimal immunosuppressive domain (ISD) active in vivo, the Inventors analyzed the effect of a series of truncations/deletions within the HIV env gene. Assay of the series of C-term truncations in FIGS. 1&2 identified a 49 residue-long domain with IS activity, with the 6 aa shorter HIV43 fragment and subsequent C-term truncated HIV37 and HIV30 fragments being IS-negative. HIV49 is embedded into the so-called ectodomain, which corresponds to a soluble part of the extracellular domain of the TM subunit, and consists in the a-helical domain involved in HIV TM trimerization, and the N-term part of the loop containing the 2 well-conserved, 6 aa-distant, cysteine residues found in most retroviral envelopes. Refine delineation of the amino acis responsible for IS activity was then performed by arginine-scanning between aa 36 and 51, i.e. in the domain associated with the transition from IS positive to negative Env subdomains. As illustrated in FIG. 3, all the X-to-Arg substitutions resulted in no significant change in the IS activity of HIV115, with one exception for Y41 and L42, which resulted in loss of IS activity of the mutant peptide.

### Mutations at Position 41

[0567] The Inventors then checked that the Y41R substitution did not alter the overall capacity of the HIV envelope to be expressed by an eucaryotic cell and to be exported at the cell membrane, by introducing the Y41R substitution into an expression vector for the HIV envelope. A FACS analysis of cell transfected with both the wild-type and the Y41R mutant using an anti-SU specific monoclonal antibody actually demonstrated quantitative expression of the mutant envelope at the cell surface, thus indicating that the Y41R mutation does not significantly alter the HIV Env structure and SU-TM interaction (FIG. 4).

[0568] A series of distinct substitutions at the Y41 position were finally performed to tentatively identify whether other amino acids could be substituted to generate IS-negative variants: the amino acid assayed included the positively charged K and H (in addition to R), the small A and G, and the hydrophobic L and F residues. Again it was checked that these substitutions did not alter the overall structure of the HIV Env with the corresponding mutations.

[0569] Among them, substitution of Y41 by A, G, L and F resulted in loss of IS (FIG. 3), and did not alter the overall structure of the HIV Env with the corresponding mutations (FIGS. 4 and 5).

### Further Mutation Outside of the ISU Domain

[0570] The effects of a set of second mutations at positions that are structurally close to Y41 position within the ENV ectodomain three-dimensional structure were also tested. Two of them (Y41R-K72A and Y41R-K78G) maintain a high level expression at cell membrane and confer infectivity (FIG. 5).

### Mutations at Position 42

[0571] Interestingly, the adjacent position to the position Y41, position L42, also resulted in loss of IS activity of the mutant peptide when the mutation L42R is introduced. This mutation maintains a high level expression at cell membrane of the mutated HIV ENV protein (FIG. 4).

Mutations within the SIV ENV Protein

[0572] Interestingly, mutation at the homologous position in SIV ENV (L42) of the position L42 in HIV-1 ENV ectodoamin also resulted in specific loss of IS activities (FIG. 6).

[0573] Accordingly, the present investigation has clearly identified a definite location and a definite substitution(s) within the HIV env resulting in the loss of its IS activity. Being compatible with the conservation of the overall structure of the human and simian lentiviral Env proteins, these substitutions should be introduced in all pharmaceutical preparations which include the Env protein as a vaccine antigen.

### Materials and Methods

### Mice and Cell Lines:

[0574] C57Bl/6 and Balb/c mice, 6-10 weeks old, were obtained from CER Janvier (Laval, France). Mice were maintained in the animal facility of the Gustave Roussy Institute in accordance with institutional regulations. 293T (ATCC CRL11268), and MCA205 cells were cultured in DMEM supplemented with 10% fetal calf serum (Invitrogen), streptomycin (100 μg/ml) and penicillin (100 units/ml).

### Plasmid Construction:

[0575] The PCEL/E160 encoding the envelope protein of the BRU/LAI HIV-1 isolate is a gift from Dr Marc Sitbon. To generate the pDFG plasmids encoding the various fragments of HIV-1 envelope ectodomain, PCR fragments generated using PCEL/E160 as a template and primer pairs 1-2 (pDFG-HIV115), 1-3 (pDFG-HIV81), 1-4 (pDFG-HIV67), 1-5 (pDFG-HIV55), 1-6 (pDFG-HIV49), 1-7 (pDFG-HIV43), 1-8 (pDFG-HIV37), 1-9 (pDFG-HIV30) were digested with SfiI and MluI and inserted into pDFG-ectoSyncytin-1 (Mangeney et al, 2007) opened with the same enzymes.

[0576] Mutated pDFG-HIV115 were obtained by successive PCR using appropriate primers. A first series of PCR was performed with pDFG HIV115 as template using primers 1-11 and 10-2, 1-13 and 12-2, 1-15 and 14-2 or 1-17 and 16-2 to introduce the E39R, Y41R, K43R or D44R mutations respectively, and primers 1-18 and 19-2, 1-20 and 21-2, 1-22 and 23-2, 1-24 and 25-2, 1-26 and 27-2, 1-28 and 29-2, 1-30 and 31-2, 1-32 and 33-2, 1-34 and 35-2, or 1-36 and 37-2 to introduce the L36R, A37R, V38R, L42R, Q45R, Q46R, L47R, L48R, G49R, or I50R mutations respectively. The PCR products were then used as templates in subsequent PCR using primers 1-2. These PCR fragments were digested with SfiI and MluI and inserted into pDFG-ectoSyncytin-1 (Mangeney et al, 2007) opened with the same enzymes.

[0577] All the constructions were sequenced before use.

TABLE 1
Primer list

| N^{o} | Name | Primer sequence (5′-3′) | SEQ ID |
|---|---|---|---|
| 1 | TM HIV Sfi-Sens | ACATggcccagccggccTCTGGTATAGTGCAGCAGC | SEQ ID NO: 295 |
| 2 | TM HIV115 Mlu-AS | GTATacgcgtTTATAATTCTTGTTCATTCTTTTC | SEQ ID NO: 296 |
| 3 | TM HIV81 Mlu AS | GTATacgcgtTTACATGTTATTCCAAATCTGTTCC | SEQ ID NO: 297 |
| 4 | TM HIV67 Mlu AS | GTATacgcgtTTAAGCATTCCAAGGCACAGC | SEQ ID NO: 298 |
| 5 | TM HIV55 Mlu AS | GTATacgcgtTTATCCAGAGCAACCCCAAATCC | SEQ ID NO: 299 |
| 6 | TMHIV49 Mlu AS | GTATacgcgtTTACCCCAGGAGCTGTTGATCC | SEQ ID NO: 300 |
| 7 | TMHIV43 Mlu AS | GTATacgcgtTTACTTTAGGTATCTTTCCACAGC | SEQ ID NO: 301 |
| 8 | TMHIV37 Mlu AS | GTATacgcgtTTAAGCCAGGATTCTTGCCTGGAG | SEQ ID NO: 302 |
| 9 | TMHIV30 Mlu AS | GTATacgcgtTTACTGCTTGATGCCCCAGAC | SEQ ID NO: 303 |
| 18 | TMHIV115 L36R as | CTTTCCACAGCCcGGATTCTTGCCTG | SEQ ID NO: 304 |
| 19 | TMHIV115 L36R s | CAGGCAAGAATCCgGGCTGTGGAAAG | SEQ ID NO: 305 |
| 20 | TMHIV115 A37R as | GTATCTTTCCACAcgCAGGATTCTTGCC | SEQ ID NO: 306 |
| 21 | TMHIV115 A37R s | GGCAAGAATCCTGcgTGTGGAAAGATAC | SEQ ID NO: 307 |
| 22 | TMHIV115 V38R as | CTTTAGGTATCTTTCCctAGCCAGGATTCTTGCC | SEQ ID NO: 308 |
| 23 | TMHIV115 V38R s | GGCAAGAATCCTGGCTagGGAAAGATACCTAAAG | SEQ ID NO: 309 |
| 11 | TMHIV115 E39R AS | CCTTTAGGTATCTTctCACAGCCAGGATTC | SEQ ID NO: 310 |
| 10 | TMHIV115 E39R S | GAATCCTGGCTGTGagAAGATACCTAAAGG | SEQ ID NO: 311 |
| 13 | TMHIV115 Y41R AS | GTTGATCCTTTAGGcgTCTTTCCACAGCCAG | SEQ ID NO: 312 |
| 12 | TMHIV115 Y41R S | CTGGCTGTGGAAAGAcgCCTAAAGGATCAAC | SEQ ID NO: 313 |
| 24 | TMHIV115 L42R as | GGAGCTGTTGATCCTTTcGGTATCTTTCCACAGCC | SEQ ID NO: 314 |
| 25 | TMHIV115 L42R s | GGCTGTGGAAAGATACCgAAAGGATCAACAGCTCC | SEQ ID NO: 315 |
| 15 | TMHIV115 K43R AS | GAGCTGTTGATCCcTTAGGTATCTTTCCAC | SEQ ID NO: 316 |
| 14 | TMHIV115 K43R S | GTGGAAAGATACCTAAgGGATCAACAGCTC | SEQ ID NO: 317 |
| 17 | TMHIV115 D44R AS | AGGAGCTGTTGAcgCTTTAGGTATCTTT | SEQ ID NO: 318 |
| 16 | TMHIV115 D44R S | AAAGATACCTAAAGcgTCAACAGCTCCT | SEQ ID NO: 319 |
| 26 | TMHIV115 Q45R as | CCCAGGAGCTGTcGATCCTTTAGGTATC | SEQ ID NO: 320 |
| 27 | TMHIV115 Q45R s | GATACCTAAAGGATCgACAGCTCCTGGG | SEQ ID NO: 321 |
| 28 | TMHIV115 Q46R as | CAAATCCCCAGGAGCcGTTGATCCTTTAG | SEQ ID NO: 322 |
| 29 | TMHIV115 Q46R s | CTAAAGGATCAACgGCTCCTGGGGATTTG | SEQ ID NO: 323 |
| 30 | TMHIV115 L47R as | CAAATCCCCAGGcGCTGTTGATCCTTTAG | SEQ ID NO: 324 |
| 31 | TMHIV115 L47R s | CTAAAGGATCAACAGCgCCTGGGGATTTG | SEQ ID NO: 325 |
| 32 | TMHIV115 L48R as | CCCAAATCCCCcGGAGCTGTTG | SEQ ID NO: 326 |
| 33 | TMHIV115 L48R s | CAACAGCTCCgGGGGATTTGGG | SEQ ID NO: 327 |
| 34 | TMHIV115 G49R as | CCCCAAATCCgCAGGAGCTGTTG | SEQ ID NO: 328 |
| 35 | TMHIV115 G49R s | CAACAGCTCCTGcGGATTTGGGG | SEQ ID NO: 329 |
| 36 | TMHIV115 150R as | GCAACCCCAtcTCCCCAGGAGCTG | SEQ ID NO: 330 |
| 37 | TMHIV115 150R s | CAGCTCCTGGGGAgaTGGGGTTGC | SEQ ID NO: 331 |
| 38 | TMHIV115 W51R as | GCAACCCCAtcTCCCCAGGAGCTG | SEQ ID NO: 332 |
| 39 | TMHIV115 W51R s | CAGCTCCTGGGGAgaTGGGGTTGC | SEQ ID NO: 333 |

### HIV115 Y41 Mutant Construction:

[0578] To explore the amino acid sequence necessary for the loss of immunosuppression, HIV115 Y41 mutants were produced by PCR using the pDFG HIV115 WT plasmid as template and pairs of primers 1-42 and 43-2, 1-44 and 45-2, 1-46 and 47-2, 1-48 and 49-2, 1-50 and 51-2, or 1-52 and 53-2, to introduce the Y41K, Y41H, Y41A, Y41G, Y41F, or Y41L mutations respectively. The PCR products were then used as templates in subsequent PCR using primers 1-2. These PCR fragments were digested with SfiI and MluI and inserted into pDFG-ectoSyncytin-1 (Mangeney et al, 2007) opened with the same enzymes

[0579] All the constructions were sequenced before use.

| N^{o} | Name | Primer sequence (5′-3′) | SEQ ID NO |
|---|---|---|---|
| 42 | TMHIV115 Y41K as | GTTGATCCTTTAGtTtTCTTTCCACAGCCAG | SEQ ID NO: 334 |
| 43 | TMHIV115 Y41K s | CTGGCTGTGGAAAGAaAaCTAAAGGATCAAC | SEQ ID NO: 335 |
| 44 | TMHIV115 Y41H as | GTTGATCCTTTAGGTgTCTTTCCACAGCCAG | SEQ ID NO: 336 |
| 45 | TMHIV115 Y41H s | CTGGCTGTGGAAAGAcACCTAAAGGATCAAC | SEQ ID NO: 337 |
| 46 | TMHIV115 Y41A as | GTTGATCCTTTAGGgcTCTTTCCACAGCCAG | SEQ ID NO: 338 |
| 47 | TMHIV115 Y41A s | CTGGCTGTGGAAAGAgcCCTAAAGGATCAAC | SEQ ID NO: 339 |
| 48 | TMHIV115 Y41G as | GTTGATCCTTTAGGccTCTTTCCACAGCCAG | SEQ ID NO: 340 |
| 49 | TMHIV115 Y41G s | CTGGCTGTGGAAAGAggCCTAAAGGATCAAC | SEQ ID NO: 341 |
| 50 | TMHIV115 Y41F as | GTTGATCCTTTAGGaATCTTTCCACAGCCAG | SEQ ID NO: 342 |
| 51 | TMHIV115 Y41F s | CTGGCTGTGGAAAGATtCCTAAAGGATCAAC | SEQ ID NO: 343 |
| 52 | TMHIV115 Y41L as | GTTGATCCTTTAGGagTCTTTCCACAGCCAG | SEQ ID NO: 344 |
| 53 | TMHIV115 Y41L s | CTGGCTGTGGAAAGActCCTAAAGGATCAAC | SEQ ID NO: 345 |

### HIV115 Y41 Double Mutants Construction:

[0580] HIV115 Y41R K72A, G or S double mutants were produced by PCR using the pDFG HIV115 Y41R plasmid as template and pairs of primers 1-94 and 93-2, 1-96 and 95-2, or 1-98 and 97-2. The PCR products were then used as templates in subsequent PCR using primers 1-2. These PCR fragments were digested with SfiI and MluI and inserted into pDFG-ectoSyncytin-1 (Mangeney et al, 2007) opened with the same enzymes. HIV115 R40X Y41R double-mutants were produced by PCR using the pDFG HIV115 Y41R as template and pairs of primers 1-54 and 55-2, 1-56 and 57-2 to introduce the R40A and R40E mutations respectively. HIV115 R40X Y41A double-mutants were produced by PCR using the pDFG HIV115 Y41A as template and pairs of primers 1-58 and 59-2, 1-60 and 61-2, 1-62 and 63-2, 1-64 and 65-2 to introduce the R40A, R40E, R40S, R40T mutations respectively. HIV115 R40X simple mutants were also generated using pDFG HIV115 WT as template and pairs of primers 1-66 and 67-2, 1-68 and 69-2, 1-70 and 71-2, 1-72 and 73-2.

[0581] The PCR products were then used as templates in subsequent PCR using primers 1-2. These PCR fragments were digested with SfiI and MluI and inserted into pDFG-ectoSyncytin-1 (Mangeney et al, 2007) opened with the same enzyme.

| N^{o} | Name | Primer sequence (5′-3′) | SEQ ID |
|---|---|---|---|
| 54 | TM HIV115 | CTGGCTGTGGAAgcAcgCCTAAAGGATCAAC | SEQ ID NO: 378 |
| | R40AY41R-S | | |
| 55 | TM HIV115 | GTTGATCCTTTAGGcgTgcTTCCACAGCCAG | SEQ ID NO: 379 |
| | R40AY41R-AS | | |
| 56 | TM HIV115 | CTGGCTGTGGAAgaAcgCCTAAAGGATCAAC | SEQ ID NO: 380 |
| | R40EY41R-S | | |
| 57 | TM HIV115 | GTTGATCCTTTAGGcgTtcTTCCACAGCCAG | SEQ ID NO: 381 |
| | R40EY41R-AS | | |
| 58 | TM HIV115 | CTGGCTGTGGAAgctgcCCTAAAGGATCAAC | SEQ ID NO: 382 |
| | R40AY41A-S | | |
| 59 | TM HIV115 | GTTGATCCTTTAGGgcagcTTCCACAGCCAG | SEQ ID NO: 383 |
| | R40AY41A-AS | | |
| 60 | TM HIV115 | CTGGCTGTGGAAgaagcCCTAAAGGATCAAC | SEQ ID NO: 384 |
| | R40EY41A-S | | |
| 61 | TM HIV115 | GTTGATCCTTTAGGgcttcTTCCACAGCCAG | SEQ ID NO: 385 |
| | R40EY41A-AS | | |
| 62 | TM HIV115 | CTGGCTGTGGAAagcgcCCTAAAGGATCAAC | SEQ ID NO: 386 |
| | R40SY41A-S | | |
| 63 | TM HIV115 | GTTGATCCTTTAGGgcgctTTCCACAGCCAG | SEQ ID NO: 387 |
| | R40SY41A-AS | | |
| 64 | TM HIV115 | CTGGCTGTGGAAacagcCCTAAAGGATCAAC | SEQ ID NO: 388 |
| | R40TY41A-S | | |
| 65 | TM HIV115 | GTTGATCCTTTAGGgctgtTTCCACAGCCAG | SEQ ID NO: 389 |
| | R40TY41A-AS | | |
| 66 | TM HIV115 R40A-S | CTGGCTGTGGAAgctTACCTAAAGGATCAAC | SEQ ID NO: 390 |
| 67 | TM HIV115 R40A- | GTTGATCCTTTAGGTAagcTTCCACAGCCAG | SEQ ID NO: 391 |
| | AS | | |
| 68 | TM HIV115 R40E-S | CTGGCTGTGGAAgaaTACCTAAAGGATCAAC | SEQ ID NO: 392 |
| 69 | TM HIV115 R40E- | GTTGATCCTTTAGGTAttcTTCCACAGCCAG | SEQ ID NO: 393 |
| | AS | | |
| 70 | TM HIV115 R40S-S | CTGGCTGTGGAAagcTACCTAAAGGATCAAC | SEQ ID NO: 394 |
| 71 | TM HIV115 R40S- | GTTGATCCTTTAGGTAgctTTCCACAGCCAG | SEQ ID NO: 395 |
| | AS | | |
| 72 | TM HIV115 R40T-S | CTGGCTGTGGAAacaTACCTAAAGGATCAAC | SEQ ID NO: 396 |
| 73 | TM HIV115 R40T- | GTTGATCCTTTAGGTAtgtTTCCACAGCCAG | SEQ ID NO: 397 |
| | AS | | |
| 93 | TMHIV115 K72A s | GCTAGTTGGAGTAATgcATCTCTGGAACAGATTTGG | SEQ ID NO: 398 |
| 94 | TMHIV115 K72A | CCAAATCTGTTCCAGAGATgcATTACTCCAACTAGC | SEQ ID NO: 399 |
| | as | | |
| 95 | TMHIV115 K72G s | GCTAGTTGGAGTAATggATCTCTGGAACAGATTTGG | SEQ ID NO: 400 |
| 96 | TMHIV115 K72G | CCAAATCTGTTCCAGAGATccATTACTCCAACTAGC | SEQ ID NO: 401 |
| | as | | |
| 97 | TMHIV115 K72S s | GCTAGTTGGAGTAATtcATCTCTGGAACAGATTTGG | SEQ ID NO: 402 |
| 98 | TMHIV115 K72S | CCAAATCTGTTCCAGAGATgaATTACTCCAACTAGC | SEQ ID NO: 403 |
| | as | | |

Introduction of HIV115 Mutations into an HIV Env Expression Vector:

[0582] To introduce these HIV envelope mutations into the HIVenv pTr712 expression vector (Schnierle et al PNAS1997), a silent mutation was first generated to create an SfiI insertion site. PCR fragments were generated using pTr712 as a template and primer pairs 38-39 and 40-41. The PCR products were then used as templates in subsequent PCR using primers 38-41. The resulting PCR fragment was then digested with BsaBI and HindIII and inserted into the pTr712 plasmid opened with the same enzymes resulting in the pTr712-Sfi plasmid. PCR fragments of each HIV115 mutation were then generated by using primers 40-41 and the pDFG HIV115 mutant plasmids as templates, digestion with SfiI and HindIII and then insertion into the pTr712-Sfi plasmid opened with the same enzymes.

[0583] All the constructions were sequenced before use.

| N^{o} | Name | Primer sequence (5′-3′) | SEQ ID NO |
|---|---|---|---|
| 38 | HIV BH10 BsaBI s | acaaattagatgttcatcaaatattacaggg | SEQ ID NO: 346 |
| 39 | HIV BH10 SfiI mutsil as | GCAACAGATGCTGTTGgGCCTCAATgGCCCTCAGCA | SEQ ID NO: 347 |
| | | AATTGTTC | |
| 40 | HIV BH10 SfiI mutsil s | GAACAATTTGCTGAGGGCcATTGAGGCcCAACAGCA | SEQ ID NO: 348 |
| | | TCTGTTGC | |
| 41 | HIV BH10 HindIII as | gtgtattaagcttgtgtaattgttaatttctc | SEQ ID NO: 349 |
| 74 | EnvHIVTr712-Xho-Age-Kozak-S | NNNNNCTCGAGACCGGTccaactagaaccATGAGAGTGA | SEQ ID NO: 404 |
| | | AGGAGAAATATCAGC | |
| 75 | EnvHIVTr712-Mlu-AS | NNNNNACGCGTTCAATATCCCTGCCTAACTC | SEQ ID NO: 405 |
| 76 | EnvHIVWT-Mlu-AS | NNNNNACGCGTTTATAGCAAAATCCTTTCCAAGC | SEQ ID NO: 406 |

Establishment of env-Expressing Tumor Cells and MCA205 Tumor-Rejection Assay:

[0584] 7.5×10⁵ 293T cells were cotransfected with the env-expressing pDFG retroviral vector to be tested (1.75 μg) and expression vectors for the MLV proteins (0.55 μg for the amphotropic MLV env vector and 1.75 μg for the MLV gag and pol vector). 36 hours post-transfection, supernatants were harvested for infection of MCA205 tumor cells (2.5 ml of supernatant per 5×10⁵ cells with 8 μg/ml polybrene). Cells were maintained in selective medium (400 units/ml hygromycin) for 3 weeks, and then washed with PBS, trypsinized and inoculated subcutaneously in the shaved area of each mouse right flank as in Mangeney et al (1998, 2007). Tumor growth was monitored by palpation twice or thrice weekly and tumor area (mm²) determined by measuring perpendicular tumor diameters. The extent of “immunosuppression” was quantified by an index based on tumor size: (Aₑₙᵥ-Aₙₒₙₑ)/Aₙₒₙₑ, where Aₑₙᵥ and Aₙₒₙₑ are the mean areas at the peak of growth of tumors from Balb/c mice injected with env-expressing or control cells, respectively.

### Analysis of HIVenv Expression:

[0585] 293T cells were transfected with 4 mg of the expression vector for the HIV-1 envelope (pTr712) either wild-type or mutated at the indicated positions, by Calcium Phosphate precipitation. Cells are washed 16 h later and then harvested 2 days post-transfection using PBS-EDTA 5 mM. The 110-H monoclonal antibody (anti-V3 loop, gift from Hybridolab, Pasteur Institute) was used (1/200 dilution) to stain the HIV envelope. As a secondary antibody, the Inventors used the goat anti mouse IgG Alexa 488 (1/400) (Invitrogen). For intracellular HIVenv staining, 293T cells were fixed with a formaldehyde buffer and then permeabilized (BD cytofix/cytoperm, BD Biosciences). The isotype mouse anti IgGlKappa (BD Biosciences) was used to control non-specific staining. Fluorescence was acquired by flow cytometry using a FACS Calibur (BD Biosciences), and data analysed by the CellQuest software (BD Biosciences).

### Mutated Env Pseudotyping and Measure of Viral Titer:

[0586] 293T cells are triple transfected with 3 mg of a reporter MLV vector carrying GFP (CNCG), 1.75 mg Mo-MLV gag-pol vector and 0.55 mg phCMV vector encoding HIV-1 envelope wt or mutated at the indicated positions. The infectivity of Mo-MLV virions pseudotyped with HIV-1 Env, harvested 48 hours post-transfection, is measured using U87 cells (CD4⁺, CXCR4⁺) as target cells. The infectivity of the enveloppes is analysed after 72 h exposure diluted 0.45 mm-filtered supernatant in presence of 4 mg/mL polybrene. The fluorescence (GFP) is acquired by flow cytometry using a FACS Calibur (BD Biosciences). The results are analysed by the CellQuest software (BD Biosciences). The resulting titers (number of infected cells/mL) are calculated as the following: (% GFP⁺cells (infected)×plated cell number)/volume of supernatant×1000.

Env SIV mutants construction:

[0587] PCR fragments were generated using p239 SPE3′ (the plasmid encoding the SIV half virus containing the envelope protein) as a template and primer pairs 77-79 and 78-80, 77-81 and 78-82, 77-83 and 78-84, 77-85 and 78-86, 77-87 and 78-88, 77-89 and 78-90 to introduce the E39R, K40R, Y41R, L42R, K43R, D44R mutations respectively. The PCR products were the used as templates in subsequent PCR using primers 77-78. The resulting PCR fragment was then digested with BmgBI and NheI and inserted into the p239 SPE3′ plasmid opened with the same enzymes.

[0588] All the constructions were sequenced before use.

Introduction of SIV Mutants Ectodomain into pDFG:

[0589] To generate the pDFG plasmids encoding the fragment of SIV envelope ectodomain-55, PCR fragments generated using p239 SPE3′ WT and mutants as a template and primer pairs 91-92, were digested with SfiI and MluI and inserted into pDFG opened with the same enzymes.

| | | | |
|---|---|---|---|
| 77 | Env SIV S | ccgctcagtcccgaactttattggc | SEQ ID NO: 350 |
| 78 | Env SIV AS | ggtggggaagagaacactggcc | SEQ ID NO: 351 |
| 79 | SIV env E39R s | cagactagggtcactgccatcCGCaagtacttaaaggaccaggcg | SEQ ID NO: 352 |
| 80 | SIV env E39R as | cgcctggtcctttaagtacttGCGgatggcagtgaccctagtctg | SEQ ID NO: 353 |
| 81 | SIV env K40R s | actagggtcactgccatcgagCGCtacttaaaggaccaggcgcag | SEQ ID NO: 354 |
| 82 | SIV env K40R as | ctgcgcctggtcctttaagtaGCGctcgatggcagtgaccctagt | SEQ ID NO: 355 |
| 83 | SIV env Y41R s | GCCATCGAGAAGcgCTTAAAGGACCAGGCG | SEQ ID NO: 356 |
| 84 | SIV env Y41R as | CGCCTGGTCCTTTAAGcgCTTCTCGATGGC | SEQ ID NO: 357 |
| 85 | SIV env L42R s | gtcactgccatcgagaagtacCGCaaggaccaggcgcagctg | SEQ ID NO: 358 |
| 86 | SIV env L42R as | cagctgcgcctggtccttGCGgtacttctcgatggcagtgac | SEQ ID NO: 359 |
| 87 | SIV env K43R s | gccatcgagaagtacttaCGCgaccaggcgcagctgaatgcttgg | SEQ ID NO: 360 |
| 88 | SIV env K43R as | ccaagcattcagctgcgcctggtcGCGtaagtacttctcgatggc | SEQ ID NO: 361 |
| 89 | SIV env D44R s | gagaagtacttaaagCGCcaggcgcagctgaatgcttgg | SEQ ID NO: 362 |
| 90 | SIV env D44R as | attcagctgcgcctgGCGctttaagtacttctcgatggc | SEQ ID NO: 363 |
| 91 | TMSIV55 Sfi S | ACATggcccagccggccgctgggatagtgcagcaac | SEQ ID NO: 364 |
| 92 | TMSIV55 Mlu AS | GTATacgcgtTTAaaacgcacatccccaagcattc | SEQ ID NO: 365 |

### Comparative Example

### Test of the In Vivo Effect of the Mutation G49R, which Corresponds to the Mutation “G19R” in the International Application WO 2010/022,740

[0590] WO 2010/022,740 discloses a consensus sequence of 50 amino acid of the HIV ENV protein. In this sequence, it is suggested that substitution of amino acids in positions 10, 19, 24, 34 and 40 affect the immunosuppressive properties of the HIV ENV protein.

[0591] These mutations are a transposition in lentivirus of the teaching of WO 2005/095,442 limited to endogenous or onco retroviruses. The authors of WO 2005/095,442 are also the authors of the present application and they early observed that such a transposition is not effective.

[0592] Despite the fact that any amino acids can be assigned to the positions 10, 19, 24, 34 or 40 in the consensus sequence of WO 2010/022,740, only one substitution (one residue for one position) was tested by ex vivo experiments in WO 2010/022,740. It is the mutation “G19R”, which corresponds to the mutation G49R in the present FIGS. 1 and 3.

[0593] Because the immune response of an individual involves different organs and different cellular and non-cellular components, ex vivo results have no predictive value concerning the in vivo immunosuppressive properties of a viral protein.

[0594] To determine if the mutations previously disclosed in WO 2010/022,740 are suitable for a medical use, the mutation G49R has been tested using the MCA205 tumor rejection in vivo assay, as defined in the section “Establishment of env-expressing tumor cells and MCA205 tumor-rejection assay” of the Example.

[0595] As shown in FIG. 3, the peptide G49R remains almost as immunosuppressive in vivo as the wild type HIV 115 peptide, with an immunosuppression index which is higher than 0.5. Thus, the mutation G49R does not induce a significant decrease of the in vivo immunosuppressive properties of the HIV ENV protein, with a ratio of immunosuppression index of G49R mutated ENV HIV 115 peptide (i_{mutated env})/immunosuppression index of wild type ENV HIV 115 peptide (i_{wild type env}), which is 0.7 (i.e. higher than 0.5).

[0596] This result demonstrates the insufficiently described teaching of WO 2010/022,740 since the only one mutation tested in WO 2010/022,740, using an ex vivo test, does not significantly affect the in vivo immunosuppressive properties of the HIV ENV protein.

[0597] As a consequence, WO 2010/022,740 raises the same technical problem as the present invention but does not offer a technical solution.

1. Pharmaceutical composition comprising as active substance:
a) an isolated mutated human or simian lentiviral ENV protein having substantially no immunosuppressive activity, said mutated human or simian lentiviral ENV protein resulting from mutation of the transmembrane (TM) subunit of a wild type human or simian lentiviral ENV protein,
said mutated human or simian lentiviral ENV protein having at least 70% identity, preferably at least 80% identity, to one sequence chosen from the group consisting of SEQ ID NO: 216, SEQ ID NO: 420 and SEQ ID NO: 421,
said mutated human or simian lentiviral ENV protein comprising a mutated immunosuppressive domain (ISU) containing the following amino acid sequence:

| | |
|---|---|
| A-[I/V]-E-[K/R]-Xₐ-X_{b}-X-D-Q, | (SEQ ID NO: 416) |

wherein,
X represents any amino acid,
and either
Xₐ is A, F, G, L, R or deleted, and X_{b} is C, D, E, H, I, K, L, M, N, P, Q, S, T, V, W or Y, or
Xₐ is C, D, E, H, I, K, M, N, P, Q, S, T, V, W or Y, and X_{b} is A, F, G, R or deleted, or
Xₐ is A, F, G, L, R or deleted, and X_{b} is A, F, G, R or deleted,
or
b) at least one fragment of said isolated mutated human or simian lentiviral ENV protein having substantially no immunosuppressive activity,
said fragment comprising at least 40 amino acids,
said fragment comprising a mutated immunosuppressive domain (ISU) containing the following amino acid sequence:

| | |
|---|---|
| A-[I/V]-E-[K/R]-Xₐ-X_{b}-X-D-Q, | (SEQ ID NO: 416) |

wherein,
X represents any amino acid,
and either
Xₐ is A, F, G, L, R or deleted, and X_{b} is C, D, E, H, I, K, L, M, N, P, Q, S, T, V, W or Y, or
Xₐ is C, D, E, H, I, K, M, N, P, Q, S, T, V, W or Y, and X_{b} is A, F, G, R or deleted, or
Xₐ is A, F, G, L, R or deleted, and X_{b} is A, F, G, R or deleted,
in association with a pharmaceutically acceptable carrier,
said substantial absence of immunosuppressive activity of the above mentioned mutated human or simian lentiviral ENV protein or of the above defined fragment being liable to be assessed by the fact that in an in vivo assay involving engrafted tumor cells rejection,
said tumor cells being transduced either so as to express said mutated ENV protein or said fragment (mutated ENV tumor cells),
or said tumor cells being transduced so as to express said wild type ENV protein or a fragment thereof (wild type ENV tumor cells),
or said tumor cells being not transduced (normal tumor cells),
the following ratio:
immunosuppression index of said mutated ENV protein or of said fragment (i_{mutated env})/immunosuppression index of wild type ENV protein (i_{wild type env}) is less than 0.5,
i_{mutated env} being defined by: (maximum area reached by mutated ENV tumor cells−maximum area reached by normal tumor cells)/(maximum area reached by normal tumor cells), and i_{wild type env} being defined by: (maximum area reached by wild type ENV tumor cells−maximum area reached by normal tumor cells)/(maximum area reached by normal tumor cells).

2. Pharmaceutical composition according to claim 1 comprising as active substance:
a) an isolated mutated human or simian lentiviral ENV protein having substantially no immunosuppressive activity, said mutated human or simian lentiviral ENV protein resulting from mutation of the transmembrane (TM) subunit of a wild type human or simian lentiviral ENV protein,
said mutated human or simian lentiviral ENV protein comprising a mutated immunosuppressive domain (ISU) containing the following amino acid sequence:

| | |
|---|---|
| A-[I/V]-E-[K/R]-Xₐ-X_{b}-X-D-Q, | (SEQ ID NO: 416) |

wherein,
X represents any amino acid,
and either
Xₐ is A, F, G, L or R, and X_{b} is C, D, E, H, I, K, L, M, N, P, Q, S, T, V, W or Y, or
Xₐ is C, D, E, H, I, K, M, N, P, Q, S, T, V, W or Y, and X_{b} is A, F, G or R, or
Xₐ is A, F, G, L or R, and X_{b} is A, F, G or R,
or
b) at least one fragment of said isolated mutated human or simian lentiviral ENV protein having substantially no immunosuppressive activity,
said fragment comprising at least 40 amino acids,
said fragment comprising a mutated immunosuppressive domain (ISU) containing the following amino acid sequence:

| | |
|---|---|
| A-[I/V]-E-[K/R]-Xₐ-X_{b}-X-D-Q, | (SEQ ID NO: 416) |

wherein,
X represents any amino acid,
and either
Xₐ is A, F, G, L or R, and X_{b} is C, D, E, H, I, K, L, M, N, P, Q, S, T, V, W or Y, or
Xₐ is C, D, E, H, I, K, M, N, P, Q, S, T, V, W or Y, and X_{b} is A, F, G or R, or
Xₐ is A, F, G, L or R, and X_{b} is A, F, G or R,
in association with a pharmaceutically acceptable carrier.

3. Pharmaceutical composition according to claim 1 comprising as active substance:
a) an isolated mutated human or simian lentiviral ENV protein having substantially no immunosuppressive activity, said mutated human or simian lentiviral ENV protein resulting from mutation of the transmembrane (TM) subunit of a wild type human or simian lentiviral ENV protein,
said mutated human or simian lentiviral ENV protein comprising a mutated immunosuppressive domain (ISU) containing the following amino acid sequence:

| | |
|---|---|
| A-[I/V]-E-[K/R]-Xₐ-X_{b}-X-D-Q, | (SEQ ID NO: 416) |

wherein
X represents any amino acid,
and either
Xₐ is A, F, G, L or R, and X_{b} is L, I, V, M or P, or
Xₐ is Y, I, H, C or T, and X_{b} is A, F, G or R, or
Xₐ is A, F, G, L or R, and X_{b} is A, F, G or R,
or
b) at least one fragment of said isolated mutated human or simian lentiviral ENV protein having substantially no immunosuppressive activity,
said fragment comprising at least 40 amino acids,
said fragment comprising a mutated immunosuppressive domain (ISU) containing the following amino acid sequence:

| | |
|---|---|
| A-[I/V]-E-[K/R]-Xₐ-X_{b}-X-D-Q, | (SEQ ID NO: 416) |

wherein
X represents any amino acid,
and either
Xₐ is A, F, G, L or R, and X_{b} is L, I, V, M or P, or
Xₐ is Y, I, H, C or T, and X_{b} is A, F, G or R, or
Xₐ is A, F, G, L or R, and X_{b} is A, F, G or R,
in association with a pharmaceutically acceptable carrier.

4. Pharmaceutical composition according to claim 1 comprising as active substance:
a) an isolated mutated human or simian lentiviral ENV protein having substantially no immunosuppressive activity, said mutated human or simian lentiviral ENV protein resulting from mutation of the transmembrane (TM) subunit of a wild type human or simian lentiviral ENV protein,
said mutated human or simian lentiviral ENV protein comprising a mutated immunosuppressive domain (ISU) containing the following amino acid sequence:

| | |
|---|---|
| A-[I/V]-E-[K/R]-Xₐ-X_{b}-X-D-Q, | (SEQ ID NO: 416) |

wherein
X represents any amino acid,
and either
Xₐ is A, G, or R, and X_{b} is C, D, E, H, I, K, L, M, N, P, Q, S, T, V, W or Y, or
Xₐ is C, D, E, H, I, K, M, N, P, Q, S, T, V, W or Y, and X_{b} is F, G or R,
or
Xₐ is F or L, and X_{b} is F, G or R,
or
Xₐ is A, G or R, and X_{b} is A,
or
Xₐ is A, G or R, and X_{b} is F, G or R,
or
b) at least one fragment of said isolated mutated human or simian lentiviral ENV protein having substantially no immunosuppressive activity,
said fragment comprising at least 40 amino acids,
said fragment comprising a mutated immunosuppressive domain (ISU) containing the following amino acid sequence:

| | |
|---|---|
| A-[I/V]-E-[K/R]-Xₐ-X_{b}-X-D-Q, | (SEQ ID NO: 416) |

wherein
X represents any amino acid,
and either
Xₐ is A, G, or R, and X_{b} is C, D, E, H, I, K, L, M, N, P, Q, S, T, V, W or Y,
or
Xₐ is C, D, E, H, I, K, M, N, P, Q, S, T, V, W or Y, and X_{b} is F, G or R,
or
Xₐ is F or L, and X_{b} is F, G or R,
or
Xₐ is A, G or R, and X_{b} is A,
or
Xₐ is A, G or R, and X_{b} is F, G, R,
in association with a pharmaceutically acceptable carrier.

5. Pharmaceutical composition according to claim 1 comprising as active substance:
a) an isolated mutated human or simian lentiviral ENV protein having substantially no immunosuppressive activity, said mutated human or simian lentiviral ENV protein resulting from mutation of the transmembrane (TM) subunit of a wild type human or simian lentiviral ENV protein,
said mutated human or simian lentiviral ENV protein comprising a mutated immunosuppressive domain (ISU) containing the following amino acid sequence:

| | |
|---|---|
| A-[I/V]-E-[K/R]-Xₐ-X_{b}-X-D-Q, | (SEQ ID NO: 416) |

wherein
X represents any amino acid,
and either
Xₐ is A, G, or R, and X_{b} is L, I, V, M or P,
or
Xₐ is Y, I, H, C or T, and X_{b} is F, G or R,
or
Xₐ is F or L, and X_{b} is F, G or R,
or
Xₐ is A, G or R, and X_{b} is A,
or
Xₐ is A, G or R, and X_{b} is F, G or R,
or
b) at least one fragment of said isolated mutated human or simian lentiviral ENV protein having substantially no immunosuppressive activity,
said fragment comprising at least 40 amino acids,
said fragment comprising a mutated immunosuppressive domain (ISU) containing the following amino acid sequence:

| | |
|---|---|
| A-[I/V]-E-[K/R]-Xₐ-X_{b}-X-D-Q, | (SEQ ID NO: 416) |

wherein
X represents any amino acid,
and either
Xₐ is A, G, or R, and X_{b} is L, I, V, M or P,
or
Xₐ is Y, I, H, C or T, and X_{b} is F, G or R,
or
Xₐ is F or L, and X_{b} is F, G or R,
or
Xₐ is A, G or R, and X_{b} is A,
or
Xₐ is A, G or R, and X_{b} is F, G or R,
in association with a pharmaceutically acceptable carrier.

6. Pharmaceutical composition according to claim 1, comprising as active substance:
a) an isolated mutated human or simian lentiviral ENV protein having substantially no immunosuppressive activity, said mutated human or simian lentiviral ENV protein resulting from mutation of the transmembrane (TM) subunit of a wild type human or simian lentiviral ENV protein,
said mutated human or simian lentiviral ENV protein comprising a mutated immunosuppressive domain (ISU) containing the following amino acid sequence:

| | |
|---|---|
| A-[I/V]-E-[K/R]-Xₐ-X_{b}-X-D-Q, | (SEQ ID NO: 416) |

wherein,
X represents any amino acid,
and either
Xₐ is A, G, or R, and X_{b} is C, D, E, H, I, K, L, M, N, P, Q, S, T, V, W or Y,
or
Xₐ is C, D, E, H, I, K, M, N, P, Q, S, T, V, W or Y, and X_{b} is F, G or R,
or
b) at least one fragment of said isolated mutated human or simian lentiviral ENV protein having substantially no immunosuppressive activity,
said fragment comprising at least 40 amino acids,
said fragment comprising a mutated immunosuppressive domain (ISU) containing the following amino acid sequence:

| | |
|---|---|
| A-[I/V]-E-[K/R]-Xₐ-X_{b}-X-D-Q, | (SEQ ID NO: 416) |

wherein,
X represents any amino acid,
and either
Xₐ is A, G, or R, and X_{b} is C, D, E, H, I, K, L, M, N, P, Q, S, T, V, W or Y,
or
Xₐ is C, D, E, H, I, K, M, N, P, Q, S, T, V, W or Y, and X_{b} is F, G or R,
in association with a pharmaceutically acceptable carrier.

7. Pharmaceutical composition according to claim 1 comprising as active substance:
a) an isolated mutated human or simian lentiviral ENV protein having substantially no immunosuppressive activity, said mutated human or simian lentiviral ENV protein resulting from mutation of the transmembrane (TM) subunit of a wild type human or simian lentiviral ENV protein,
said mutated human or simian lentiviral ENV protein comprising a mutated immunosuppressive domain (ISU) containing the following amino acid sequence:

| | |
|---|---|
| A-[I/V]-E-[K/R]-Xₐ-X_{b}-X-D-Q, | (SEQ ID NO: 416) |

wherein,
X represents any amino acid,
and either
Xₐ is A, G, or R, and X_{b} is L, I, V, M or P,
or
Xₐ is Y, I, H, C or T, and X_{b} is F, G or R,
or
b) at least one fragment of said isolated mutated human or simian lentiviral ENV protein having substantially no immunosuppressive activity,
said fragment comprising at least 40 amino acids,
said fragment comprising a mutated immunosuppressive domain (ISU) containing the following amino acid sequence:

| | |
|---|---|
| A-[I/V]-E-[K/R]-Xₐ-X_{b}-X-D-Q, | (SEQ ID NO: 416) |

wherein,
X represents any amino acid,
and either
Xₐ is A, G, or R, and X_{b} is L, I, V, M or P,
or
Xₐ is Y, I, H, C or T, and X_{b} is F, G or R,
in association with a pharmaceutically acceptable carrier.

8. Pharmaceutical composition according to claim 1,
wherein
Xₐ is R, and X_{b} is C, D, E, H, I, K, L, M, N, P, Q, S, T, V, W or Y, or
Xₐ is C, D, E, H, I, K, M, N, P, Q, S, T, V, W or Y, and X_{b} is R, or
Xₐ is R, and X_{b} is R.

9. Pharmaceutical composition according to claim 1, wherein said isolated mutated human or simian lentiviral ENV protein or said fragment of said isolated mutated human or simian lentiviral ENV protein comprises one of the following amino acid sequences:

| | |
|---|---|
| A-I-E-K-Xₐ-X_{b}-X-DQ, | (SEQ ID NO: 422) |
| A-I-E-R-Xₐ-X_{b}-X-DQ, | (SEQ ID NO: 423) |
| A-V-E-K-Xₐ-X_{b}-X-DQ, | (SEQ ID NO: 424) |
| A-V-E-R-Xₐ-X_{b}-X-DQ. | (SEQ ID NO: 425) |

10. Pharmaceutical composition according to claim 1, wherein said isolated mutated human or simian lentiviral ENV protein or said fragment of said isolated mutated human or simian lentiviral ENV protein comprises one of the amino acid sequences:
SEQ ID NO: 13, SEQ ID NO: 42, SEQ ID NO: 71,
SEQ ID NO: 9 to 12,
SEQ ID NO: 14 to 41,
SEQ ID NO: 43 to 70, and
SEQ ID NO: 72 to 95.

11. Pharmaceutical composition according to claim 1, wherein said isolated mutated human or simian lentiviral ENV protein or said fragment of said isolated mutated human or simian lentiviral ENV protein comprises one of the amino acid sequences:
SEQ ID NO: 13, SEQ ID NO: 42, SEQ ID NO: 71,
SEQ ID NO: 9, 11, 15 to 21, 23 to 29, 31 to 38, 40, 44 to 50, 52 to 58, 60 to 67, 69, 73 to 79, 81 to 87, 89 to 95.

12. Pharmaceutical composition according to claim 1, wherein said isolated mutated human or simian lentiviral ENV protein or said fragment of said isolated mutated human or simian lentiviral ENV protein comprises one of the amino acid sequences: SEQ ID NO: 96 to 211.

13. Pharmaceutical composition according to claim 1, wherein said isolated mutated human or simian lentiviral ENV protein or said fragment of said isolated mutated human or simian lentiviral ENV protein comprises one of the amino acid sequences: SEQ ID NO: 96, 98, 100, 102 to 108, 110 to 116, 118 to 125, 127, 129, 131 to 137, 139 to 145, 147 to 154, 156, 158, 160 to 166, 168 to 174, 176 to 183, 185, 187, 189 to 195, 197 to 203, 205 to 211.

14. Pharmaceutical composition according to claim 1, wherein said isolated mutated human or simian lentiviral ENV protein consists of one of the amino acid sequences: SEQ ID NO: 212 to 269.

15. Pharmaceutical composition according to claim 1, wherein said isolated mutated human or simian lentiviral ENV protein consists of one of the amino acid sequences: SEQ ID NO: 212, 214, 216, 218 to 224, 226 to 232, 234 to 241, 243, 245, 247 to 253, 255 to 261, 263 to 269.

16. Pharmaceutical composition according to claim 1, wherein said mutated protein comprises an additional mutation in one at least of the amino acids at positions 29, 36 and 37 of SEQ ID NO: 426:
(SEQ ID NO: 426)
A[I/V]E[K/R]XₐX_{b}X₁DQX₂X₃LX₄X₅WGC[A/S][F/G]X₆X₇
CVX₈TX₉VPX_{c}X₁₀Z₁Z₂Z₃Z₄Z₅X_{d}Xₑ[S/T]
wherein
Xₐ and X_{b} are as previously defined,
X₁ to X₁₀ represent any amino acid,
Z₁ to Z₅ represent no amino acid or any amino acid, independently from each other
such that
X_{c} is A, C, D, E, F, G, H, I, K, L, M, N, P, Q, R, S, T, V, Y, or deleted, preferably A, D, or N,
X_{d} is A, C, D, E, F, G, H, I, L, M, N, P, Q, R, S, T V, Y, W, or deleted, preferably A, G, S or Y,
Xₑ is A, C, D, E, F, G, H, I, K, L, M, N, P, Q, R, T V, Y, W, or deleted, preferably A, D or N.

17. Pharmaceutical composition according to claim 1, wherein said mutated protein consists of one of the amino acid sequences of the group consisting of SEQ ID NO: 271 to 283.

18. Pharmaceutical composition comprising as active substance a nucleic acid molecule coding for a mutated human or simian lentiviral ENV protein, or a fragment of said mutated human or simian lentiviral ENV protein, as defined in claim 1.

19. Pharmaceutical composition according to claim 18, wherein said nucleic acid molecule being contained in a vector, said vector comprising means allowing the expression of the mutated human or simian lentiviral ENV protein, or a fragment of said mutated human or simian lentiviral ENV protein, as previously defined.

20. Pharmaceutical composition according to claim 19, wherein said vector being chosen among a measles vector, a canarypox vector, a pox vector, a fowlpox, an adenoviral vector, a lentiviral vector, a Sendaï virus, a Cytomegalovirus vector or a Modified Vaccinia Ankara vector.

21. Pharmaceutical composition, according to claim 18, comprising at least one nucleic acid molecule coding for a GAG protein and/or a PRO protein and/or a POL protein and/or a mutated NEF protein, wherein
said mutated NEF protein is substantially devoid of immunosuppressive properties,
of a human or simian lentivirus, said lentivirus being preferably of the same origin as the mutated lentiviral ENV protein.

22. Pharmaceutical composition, according to claim 19, wherein said nucleic acid molecule coding for a mutated human or simian lentiviral ENV protein, or a fragment of said mutated human or simian lentiviral ENV protein, is contained in the same vector as the one which also contains said at least one nucleic acid molecule coding for a GAG protein and/or a PRO protein and/or a POL protein and/or a mutated NEF protein, wherein said mutated NEF protein is substantially devoid of immunosuppressive properties.

23. Pharmaceutical composition, according to claim 19, wherein said nucleic acid molecule coding for a mutated human or simian lentiviral ENV protein, or a fragment of said mutated human or simian lentiviral ENV protein, is contained in the same vector as the one which also contains all said at least one nucleic acid molecule coding for a GAG protein and/or a PRO protein and/or a POL protein and/or a mutated NEF protein, wherein said mutated NEF protein is substantially devoid of immunosuppressive properties.

24. Pharmaceutical composition, according to claim 19, wherein said nucleic acid molecule coding for a mutated human or simian lentiviral ENV protein, or a fragment of said mutated human or simian lentiviral ENV protein, is contained in a vector which is different from the at least one vector containing said at least one nucleic acid molecule coding for a GAG protein and/or a PRO protein and/or a POL protein and/or a mutated NEF protein, wherein said mutated NEF protein is substantially devoid of immunosuppressive properties.

25. Pharmaceutical composition, according to claim 19, wherein said nucleic acid molecule coding for a mutated human or simian lentiviral ENV protein, or a fragment of said mutated human or simian lentiviral ENV protein, said nucleic acid molecule coding for a GAG protein, said nucleic acid molecule coding for a PRO protein, said nucleic acid molecule coding for a POL protein and said nucleic acid molecule coding for a mutated NEF protein substantially devoid of immunosuppressive properties, are all contained in vectors which are different from each other.

26. Pharmaceutical composition, according to claim 19, comprising at least one nucleic acid molecule coding for a GAG protein and/or a mutated NEF protein, wherein said mutated NEF protein is substantially devoid of immunosuppressive properties,
of a human or simian lentivirus, said lentivirus being preferably of the same origin as the mutated lentiviral ENV protein.

27. Pharmaceutical composition, according to claim 18, wherein said nucleic acid molecule coding for a mutated human or simian lentiviral ENV protein, or a fragment of said mutated human or simian lentiviral ENV protein, is contained in the same vector as the one which also contains said at least one nucleic acid molecule coding for a GAG protein and/or a mutated NEF protein, wherein said mutated NEF protein is substantially devoid of immunosuppressive properties.

28. Pharmaceutical composition, according to claim 18, wherein said nucleic acid molecule coding for a mutated human or simian lentiviral ENV protein, or a fragment of said mutated human or simian lentiviral ENV protein, is contained in the same vector as the one which also contains a nucleic acid molecule coding for a GAG protein and for a mutated NEF protein, wherein said mutated NEF protein is substantially devoid of immunosuppressive properties.

29. Pharmaceutical composition, according to claim 18, wherein said nucleic acid molecule coding for a mutated human or simian lentiviral ENV protein, or a fragment of said mutated human or simian lentiviral ENV protein, is contained in the same vector as the one which also contains a nucleic acid molecule coding for a GAG protein and for a mutated NEF protein, wherein said mutated NEF protein is substantially devoid of immunosuppressive properties, said vector being a measles vector or a canary pox vector.

30. Pharmaceutical composition, according to claim 18,
wherein said nucleic acid molecule coding for a mutated human or simian lentiviral ENV protein, or a fragment of said mutated human or simian lentiviral ENV protein, is contained in a vector which is different from the at least one vector containing said at least one nucleic acid molecule coding for a GAG protein and/or a mutated NEF protein, wherein said mutated NEF protein is substantially devoid of immunosuppressive properties.

31. Pharmaceutical composition, according to claim 18,
wherein said nucleic acid molecule coding for a mutated human or simian lentiviral ENV protein, or a fragment of said mutated human or simian lentiviral ENV protein, said nucleic acid molecule coding for a GAG protein and said nucleic acid molecule coding for a mutated NEF protein substantially devoid of immunosuppressive properties, are all contained in vectors which are different from each other.

32. Pharmaceutical composition according to claim 1, in association with at least one antiviral compound, preferably for a simultaneous, separated or sequential use.

33. Pharmaceutical composition according to claim 1, for its use for stimulating an immune response in a host organism.

34. Pharmaceutical composition according to claim 1, for its use for the prevention or the treatment of lentiviral infection, preferably HIV-1 infection, HIV-2 infection or SIV infection.

35. Pharmaceutical composition according to claim 1, for its use as a vaccine, in particular against HIV-1 infection, HIV-2 infection or SIV infection.

36. A method to obtain the active substance of a pharmaceutical composition, as defined in claim 1, consisting of modifying the immunosuppressive property of:
a wild-type human or simian lentiviral ENV protein,
or a fragment of said wild-type human or simian lentiviral ENV protein, said fragment comprising at least 40 amino acids,
said ENV protein or fragment thereof presenting a transmembrane subunit (TM) comprising an immunosuppressive domain (ISU) containing the following amino acid sequence:

| | |
|---|---|
| A-[I/V]-E-[K/R]-X′ₐ-X′_{b}-X-D-Q, | (SEQ ID NO: 427) |

wherein
X represents any amino acid,
X′ₐ is C, D, E, H, I, K, M, N, P, Q, S, T, V, W or Y, and
X′_{b} is C, D, E, H, I, K, L, M, N, P, Q, 5, T, V, W or Y,
said method comprising a step of introduction of at least one mutation of X′ₐ and/or X′_{b},
to obtain:
an isolated mutated human or simian lentiviral ENV protein having substantially no immunosuppressive activity,
said mutated human or simian lentiviral ENV protein having at least 70% identity, preferably at least 80% identity, to one sequence chosen from the group consisting of SEQ ID NO: 216, SEQ ID NO: 420 and SEQ ID NO: 421,
or a fragment of said isolated mutated human or simian lentiviral ENV protein having substantially no immunosuppressive activity, said fragment comprising at least 40 amino acids,
said mutated ENV protein and fragment thereof comprising a mutated immunosuppressive domain (ISU) containing the following amino sequence:

| | |
|---|---|
| A-[I/V]-E-[K/R]-Xₐ-X_{b}-X-D-Q, | (SEQ ID NO: 416) |

wherein
X represents any amino acid,
and either
Xₐ is A, F, G, L, R or deleted, and X_{b} is C, D, E, H, I, K, L, M, N, P, Q, S, T, V, W or Y, or
Xₐ is C, D, E, H, I, K, M, N, P, Q, S, T, V, W or Y, and X_{b} is A, F, G, R or deleted, or
Xₐ is A, F, G, L, R or deleted, and X_{b} is A, F, G, R or deleted,
said substantial absence of immunosuppressive activity of the above mentioned mutated human or simian lentiviral ENV protein or of the above defined fragment being liable to be assessed by the fact that in an in vivo assay involving engrafted tumor cells rejection,
said tumor cells being transduced either so as to express said mutated ENV protein or said fragment (mutated ENV tumor cells),
or said tumor cells being transduced so as to express said wild type ENV protein or a fragment thereof (wild type ENV tumor cells),
or said tumor cells being not transduced (normal tumor cells),
the following ratio:
immunosuppression index of said mutated ENV protein or of said fragment (i_{mutated env})/immunosuppression index of wild type ENV protein (i_{wild type env}) is less than 0.5,
i_{mutated env} being defined by: (maximum area reached by mutated ENV tumor cells−maximum area reached by normal tumor cells)/(maximum area reached by normal tumor cells), and i_{wild type env} being defined by: (maximum area reached by wild type ENV tumor cells−maximum area reached by normal tumor cells)/(maximum area reached by normal tumor cells).

37. A method to obtain the active substance of a pharmaceutical composition, as defined in claim 1, consisting of modifying the immunosuppressive property of:
a wild-type human or simian lentiviral ENV protein,
or a fragment of said wild-type human or simian lentiviral ENV protein, said fragment comprising at least 40 amino acids,
said ENV protein or fragment thereof presenting a transmembrane subunit (TM) comprising an immunosuppressive domain (ISU) containing the following amino acid sequence:

| | |
|---|---|
| A-[I/V]-E-[K/R]-Y-L-X-D-Q, | (SEQ ID NO: 1) |

wherein
X represents any amino acid,
said method comprising a step of introduction of at least one mutation of Y in position 5 and/or L in position 6,
to obtain:
an isolated mutated human or simian lentiviral ENV protein having substantially no immunosuppressive activity,
or a fragment of said isolated mutated human or simian lentiviral ENV protein having substantially no immunosuppressive activity, said fragment comprising at least 40 amino acids,
said mutated ENV protein and fragment thereof comprising a mutated immunosuppressive domain (ISU) containing the following amino sequence:

| | |
|---|---|
| A-[I/V]-E-[K/R]-Xₐ-X_{b}-X-D-Q, | (SEQ ID NO: 416) |

wherein
X represents any amino acid,
and either
Xₐ is A, F, G, L, R or deleted, and X_{b} is C, D, E, H, I, K, L, M, N, P, Q, S, T, V, W or Y, or
Xₐ is C, D, E, H, I, K, M, N, P, Q, S, T, V, W or Y, and X_{b} is A, F, G, R or deleted, or
Xₐ is A, F, G, L, R or deleted, and X_{b} is A, F, G, R or deleted.

38. A method to obtain the active substance of a pharmaceutical composition, as defined in claim 1,
wherein said isolated mutated human or simian lentiviral ENV protein having substantially no immunosuppressive activity, or a fragment of said isolated mutated human or simian lentiviral ENV protein having substantially no immunosuppressive activity, said fragment comprising at least 40 amino acids,
said mutated ENV protein and fragment thereof comprising a mutated immunosuppressive domain (ISU) containing the following amino sequence:

| | |
|---|---|
| A-[I/V]-E-[K/R]-Xₐ-X_{b}-X-D-Q, | (SEQ ID NO: 416) |

wherein
X represents any amino acid,
and either
Xₐ is A, F, G, L or R, and X_{b} is C, D, E, H, I, K, L, M, N, P, Q, S, T, V, W or Y, or
Xₐ is C, D, E, H, I, K, M, N, P, Q, S, T, V, W or Y, and X_{b} is A, F, G or R, or
Xₐ is A, F, G, L or R, and X_{b} is A, F, G or R.

39. A method to obtain the active substance of a pharmaceutical composition, as defined in claim 1,
wherein said isolated mutated human or simian lentiviral ENV protein having substantially no immunosuppressive activity, or a fragment of said isolated mutated human or simian lentiviral ENV protein having substantially no immunosuppressive activity, said fragment comprising at least 40 amino acids,
said mutated ENV protein and fragment thereof comprising a mutated immunosuppressive domain (ISU) containing the following amino sequence:

| | |
|---|---|
| A-[I/V]-E-[K/R]-Xₐ-X_{b}-X-D-Q, | (SEQ ID NO: 416) |

wherein
X represents any amino acid,
and either
Xₐ is A, F, G, L or R, and X_{b} is L, I, V, M or P, or
Xₐ is Y, I, H, C or T, and X_{b} is A, F, G or R, or
Xₐ is A, F, G, L or R, and X_{b} is A, F, G or R.

40. A method to obtain the active substance of a pharmaceutical composition, as defined in claim 1,
wherein said isolated mutated human or simian lentiviral ENV protein having substantially no immunosuppressive activity, or a fragment of said isolated mutated human or simian lentiviral ENV protein having substantially no immunosuppressive activity, said fragment comprising at least 40 amino acids,
said mutated ENV protein and fragment thereof comprising a mutated immunosuppressive domain (ISU) containing the following amino sequence:

| | |
|---|---|
| A-[I/V]-E-[K/R]-Xₐ-X_{b}-X-D-Q, | (SEQ ID NO: 416) |

wherein
X represents any amino acid,
and either
Xₐ is A, G, or R, and X_{b} is C, D, E, H, I, K, L, M, N, P, Q, S, T, V, W or Y, or
Xₐ is C, D, E, H, I, K, M, N, P, Q, S, T, V, W or Y, and X_{b} is F, G or R, or
Xₐ is F or L, and X_{b} is F, G or R, or
Xₐ is A, G or R, and X_{b} is A.

41. A method to obtain the active substance of a pharmaceutical composition, as defined in claim 1,
wherein said isolated mutated human or simian lentiviral ENV protein having substantially no immunosuppressive activity, or a fragment of said isolated mutated human or simian lentiviral ENV protein having substantially no immunosuppressive activity, said fragment comprising at least 40 amino acids,
said mutated ENV protein and fragment thereof comprising a mutated immunosuppressive domain (ISU) containing the following amino sequence:

| | |
|---|---|
| A-[I/V]-E-[K/R]-Xₐ-X_{b}-X-D-Q, | (SEQ ID NO: 416) |

wherein
X represents any amino acid,
and either
Xₐ is A, G, or R, and X_{b} is L, I, V, M or P, or
Xₐ is Y, I, H, C or T, and X_{b} is F, G or R, or
Xₐ is F or L, and X_{b} is F, G or R, or
Xₐ is A, G or R, and X_{b} is A, or
Xₐ is A, G or R, and X_{b} is F, G or R.

42. A method to obtain the active substance of a pharmaceutical composition, as defined in claim 1,
wherein said isolated mutated human or simian lentiviral ENV protein having substantially no immunosuppressive activity, or a fragment of said isolated mutated human or simian lentiviral ENV protein having substantially no immunosuppressive activity, said fragment comprising at least 40 amino acids,
said mutated ENV protein and fragment thereof comprising a mutated immunosuppressive domain (ISU) containing the following amino sequence:

| | |
|---|---|
| A-[I/V]-E-[K/R]-Xₐ-X_{b}-X-D-Q, | (SEQ ID NO: 416) |

wherein,
X represents any amino acid,
and either
Xₐ is A, G, or R, and X_{b} is C, D, E, H, I, K, L, M, N, P, Q, S, T, V, W or Y, or
Xₐ is C, D, E, H, I, K, M, N, P, Q, S, T, V, W or Y, and X_{b} is F, G or R.

43. A method to obtain the active substance of a pharmaceutical composition, as defined in claim 1,
wherein said isolated mutated human or simian lentiviral ENV protein having substantially no immunosuppressive activity, or a fragment of said isolated mutated human or simian lentiviral ENV protein having substantially no immunosuppressive activity, said fragment comprising at least 40 amino acids,
said mutated ENV protein and fragment thereof comprising a mutated immunosuppressive domain (ISU) containing the following amino sequence:

| | |
|---|---|
| A-[I/V]-E-[K/R]-Xₐ-X_{b}-X-D-Q, | (SEQ ID NO: 416) |

wherein,
X represents any amino acid,
and either
Xₐ is A, G, or R, and X_{b} is L, I, V, M or P, or
Xₐ is Y, I, H, C or T, and X_{b} is F, G or R.

44. A method to obtain the active substance of a pharmaceutical composition, as defined in claim 1,
wherein said isolated mutated human or simian lentiviral ENV protein having substantially no immunosuppressive activity, or a fragment of said isolated mutated human or simian lentiviral ENV protein having substantially no immunosuppressive activity, said fragment comprising at least 40 amino acids,
said mutated ENV protein and fragment thereof comprising a mutated immunosuppressive domain (ISU) containing the following amino sequence:

| | |
|---|---|
| A-[I/V]-E-[K/R]-Xₐ-X_{b}-X-D-Q, | (SEQ ID NO: 416) |

wherein,
X represents any amino acid,
and either
Xₐ is R, and X_{b} is C, D, E, H, I, K, L, M, N, P, Q, S, T, V, W or Y, or
Xₐ is C, D, E, H, I, K, M, N, P, Q, S, T, V, W or Y, and X_{b} is R, or
Xₐ is R, and X_{b} is R.

45. A method to obtain the active substance of a pharmaceutical composition, as defined in claim 1,
wherein said isolated mutated human or simian lentiviral ENV protein having substantially no immunosuppressive activity, or a fragment of said isolated mutated human or simian lentiviral ENV protein having substantially no immunosuppressive activity, said fragment comprising at least 40 amino acids,
said mutated ENV protein and fragment thereof comprising an additional mutation in one at least of the amino acids at positions, 29, 36 and 37 of SEQ ID NO: X:
(SEQ ID NO: 426)
A[I/V]E[K/R]XₐX_{b}X₁DQX₂X₃LX₄X₅WGC[A/S][F/G]X₆X₇
CVX₈TX₉VPX_{c}X₁₀Z₁Z₂Z₃Z₄Z₅X_{d}Xₑ[S/T]
wherein
Xₐ and X_{b} are as previously defined,
X₁ to X₁₀ represent any amino acid,
Z₁ to Z₅ represent no amino acid or any amino acid, independently from each other
such that
X_{c} is A, C, D, E, F, G, H, I, K, L, M, N, P, Q, R, S, T, V, Y, or deleted, preferably A, D, or N,
X_{d} is A, C, D, E, F, G, H, I, L, M, N, P, Q, R, S, T, V, Y, W, or deleted, preferably A, G, S or Y,
Xₑ is A, C, D, E, F, G, H, I, K, L, M, N, P, Q, R, T V, Y, W, or deleted, preferably A, D or N.

The application's sequence listing, which the Patent Office published only in electronic form, follows.

SEQUENCE LISTING (428 sequences)

SEQ ID NO: 1 - protein, 9 aa, Artificial Sequence
  fragment of lentiviral ENV ISU
  MISC_FEATURE (2)..(2): Xaa = Ile or Val
  MISC_FEATURE (4)..(4): Xaa = K or R
  misc_feature (7)..(7): Xaa can be any naturally occurring amino acid
AXEXYLXDQ

SEQ ID NO: 2 - protein, 9 aa, Artificial Sequence
  fragement of lentiviral ENV ISU
  misc_feature (7)..(7): Xaa can be any naturally occurring amino acid
AIEKYLXDQ

SEQ ID NO: 3 - protein, 9 aa, Artificial Sequence
  fragement of lentiviral ENV ISU
  misc_feature (7)..(7): Xaa can be any naturally occurring amino acid
AIERYLXDQ

SEQ ID NO: 4 - protein, 9 aa, Artificial Sequence
  fragment of lentiviral ENV ISU
  misc_feature (7)..(7): Xaa can be any naturally occurring amino acid
AVEKYLXDQ

SEQ ID NO: 5 - protein, 9 aa, Artificial Sequence
  fragment of lentiviral ENV ISU
  misc_feature (7)..(7): Xaa can be any naturally occurring amino acid
AVERYLXDQ

SEQ ID NO: 6 - protein, 49 aa, Artificial Sequence
  fragment of lentiviral ENV ISU
  misc_feature (1)..(1): Xaa can be any naturally occurring amino acid
  misc_feature (8)..(9): Xaa can be any naturally occurring amino acid
  misc_feature (12)..(17): Xaa can be any naturally occurring amino acid
  misc_feature (19)..(20): Xaa can be any naturally occurring amino acid
  misc_feature (22)..(22): Xaa can be any naturally occurring amino acid
  misc_feature (24)..(25): Xaa can be any naturally occurring amino acid
  misc_feature (28)..(28): Xaa can be any naturally occurring amino acid
  misc_feature (30)..(30): Xaa can be any naturally occurring amino acid
  misc_feature (33)..(33): Xaa can be any naturally occurring amino acid
  misc_feature (35)..(36): Xaa can be any naturally occurring amino acid
  MISC_FEATURE (38)..(38): Xaa = I or V
  MISC_FEATURE (40)..(40): Xaa = R or K
  misc_feature (43)..(43): Xaa can be any naturally occurring amino acid
  misc_feature (46)..(47): Xaa can be any naturally occurring amino acid
  misc_feature (49)..(49): Xaa can be any naturally occurring amino acid
XGIVQQQXXLLXXXXXXQXXLXLXXWGXKXLQXRXXAXEXYLXDQXXLX

SEQ ID NO: 7 - protein, 9 aa, Artificial Sequence
  fragment of lentiviral ENV ISU
AVERYLKDQ

SEQ ID NO: 8 - protein, 9 aa, Artificial Sequence
  fragment of lentiviral ENV ISU
AIEKYLKDQ

SEQ ID NO: 9 - protein, 8 aa, Artificial Sequence
  fragment of lentiviral ENV ISU
AVERALKD

SEQ ID NO: 10 - protein, 8 aa, Artificial sequence
  fragment of lentiviral ENV ISU
AVERFLKD

SEQ ID NO: 11 - protein, 8 aa, Artificial sequence
  fragment of lentiviral ENV ISU
AVERGLKD

SEQ ID NO: 12 - protein, 8 aa, Artificial sequence
  fragment of lentiviral ENV ISU
AVERLLKD

SEQ ID NO: 13 - protein, 8 aa, Artificial sequence
  fragment of lentiviral ENV ISU
AVERRLKD

SEQ ID NO: 14 - protein, 8 aa, Artificial sequence
  fragment of lentiviral ENV ISU
AVERYAKD

SEQ ID NO: 15 - protein, 8 aa, Artificial sequence
  fragment of lentiviral ENV ISU
AVERYFKD

SEQ ID NO: 16 - protein, 8 aa, Artificial sequence
  fragment of lentiviral ENV ISU
AVERYGKD

SEQ ID NO: 17 - protein, 8 aa, Artificial sequence
  fragment of lentiviral ENV ISU
AVERYRKD

SEQ ID NO: 18 - protein, 8 aa, Artificial sequence
  fragment of lentiviral ENV ISU
AVERAAKD

SEQ ID NO: 19 - protein, 8 aa, Artificial sequence
  fragment of lentiviral ENV ISU
AVERAFKD

SEQ ID NO: 20 - protein, 8 aa, Artificial sequence
  fragment of lentiviral ENV ISU
AVERAGKD

SEQ ID NO: 21 - protein, 8 aa, Artificial sequence
  fragment of lentiviral ENV ISU
AVERARKD

SEQ ID NO: 22 - protein, 8 aa, Artificial sequence
  fragment of lentiviral ENV ISU
AVERFAKD

SEQ ID NO: 23 - protein, 8 aa, Artificial sequence
  fragment of lentiviral ENV ISU
AVERFFKD

SEQ ID NO: 24 - protein, 8 aa, Artificial sequence
  fragment of lentiviral ENV ISU
AVERFGKD

SEQ ID NO: 25 - protein, 8 aa, Artificial sequence
  fragment of lentiviral ENV ISU
AVERFRKD

SEQ ID NO: 26 - protein, 8 aa, Artificial sequence
  fragment of lentiviral ENV ISU
AVERGAKD

SEQ ID NO: 27 - protein, 8 aa, Artificial sequence
  fragment of lentiviral ENV ISU
AVERGFKD

SEQ ID NO: 28 - protein, 8 aa, Artificial sequence
  fragment of lentiviral ENV ISU
AVERGGKD

SEQ ID NO: 29 - protein, 8 aa, Artificial sequence
  fragment of lentiviral ENV ISU
AVERGRKD

SEQ ID NO: 30 - protein, 8 aa, Artificial sequence
  fragment of lentiviral ENV ISU
AVERLAKD

SEQ ID NO: 31 - protein, 8 aa, Artificial sequence
  fragment of lentiviral ENV ISU
AVERLFKD

SEQ ID NO: 32 - protein, 8 aa, Artificial sequence
  fragment of lentiviral ENV ISU
AVERLGKD

SEQ ID NO: 33 - protein, 8 aa, Artificial sequence
  fragment of lentiviral ENV ISU
AVERLRKD

SEQ ID NO: 34 - protein, 8 aa, Artificial sequence
  fragment of lentiviral ENV ISU
AVERRAKD

SEQ ID NO: 35 - protein, 8 aa, Artificial sequence
  fragment of lentiviral ENV ISU
AVERRFKD

SEQ ID NO: 36 - protein, 8 aa, Artificial sequence
  fragment of lentiviral ENV ISU
AVERRGKD

SEQ ID NO: 37 - protein, 8 aa, Artificial sequence
  fragment of lentiviral ENV ISU
AVERRRKD

SEQ ID NO: 38 - protein, 8 aa, Artificial sequence
  fragement of lentiviral ENV ISU
AIEKALKD

SEQ ID NO: 39 - protein, 8 aa, Artificial sequence
  fragement of lentiviral ENV ISU
AIEKFLKD

SEQ ID NO: 40 - protein, 8 aa, Artificial sequence
  fragement of lentiviral ENV ISU
AIEKGLKD

SEQ ID NO: 41 - protein, 8 aa, Artificial sequence
  fragement of lentiviral ENV ISU
AIEKLLKD

SEQ ID NO: 42 - protein, 8 aa, Artificial sequence
  fragement of lentiviral ENV ISU
AIEKRLKD

SEQ ID NO: 43 - protein, 8 aa, Artificial sequence
  fragement of lentiviral ENV ISU
AIEKYAKD

SEQ ID NO: 44 - protein, 8 aa, Artificial sequence
  fragement of lentiviral ENV ISU
AIEKYFKD

SEQ ID NO: 45 - protein, 8 aa, Artificial sequence
  fragement of lentiviral ENV ISU
AIEKYGKD

SEQ ID NO: 46 - protein, 8 aa, Artificial sequence
  fragement of lentiviral ENV ISU
AIEKYRKD

SEQ ID NO: 47 - protein, 8 aa, Artificial sequence
  fragement of lentiviral ENV ISU
AIEKAAKD

SEQ ID NO: 48 - protein, 8 aa, Artificial sequence
  fragement of lentiviral ENV ISU
AIEKAFKD

SEQ ID NO: 49 - protein, 8 aa, Artificial sequence
  fragement of lentiviral ENV ISU
AIEKAGKD

SEQ ID NO: 50 - protein, 8 aa, Artificial sequence
  fragement of lentiviral ENV ISU
AIEKARKD

SEQ ID NO: 51 - protein, 8 aa, Artificial sequence
  fragement of lentiviral ENV ISU
AIEKFAKD

SEQ ID NO: 52 - protein, 8 aa, Artificial sequence
  fragement of lentiviral ENV ISU
AIEKFFKD

SEQ ID NO: 53 - protein, 8 aa, Artificial sequence
  fragement of lentiviral ENV ISU
AIEKFGKD

SEQ ID NO: 54 - protein, 8 aa, Artificial sequence
  fragement of lentiviral ENV ISU
AIEKFRKD

SEQ ID NO: 55 - protein, 8 aa, Artificial sequence
  fragement of lentiviral ENV ISU
AIEKGAKD

SEQ ID NO: 56 - protein, 8 aa, Artificial sequence
  fragement of lentiviral ENV ISU
AIEKGFKD

SEQ ID NO: 57 - protein, 8 aa, Artificial sequence
  fragement of lentiviral ENV ISU
AIEKGGKD

SEQ ID NO: 58 - protein, 8 aa, Artificial sequence
  fragement of lentiviral ENV ISU
AIEKGRKD

SEQ ID NO: 59 - protein, 8 aa, Artificial sequence
  fragement of lentiviral ENV ISU
AIEKLAKD

SEQ ID NO: 60 - protein, 8 aa, Artificial sequence
  fragement of lentiviral ENV ISU
AIEKLFKD

SEQ ID NO: 61 - protein, 8 aa, Artificial sequence
  fragement of lentiviral ENV ISU
AIEKLGKD

SEQ ID NO: 62 - protein, 8 aa, Artificial sequence
  fragement of lentiviral ENV ISU
AIEKLRKD

SEQ ID NO: 63 - protein, 8 aa, Artificial sequence
  fragement of lentiviral ENV ISU
AIEKRAKD

SEQ ID NO: 64 - protein, 8 aa, Artificial sequence
  fragement of lentiviral ENV ISU
AIEKRFKD

SEQ ID NO: 65 - protein, 8 aa, Artificial sequence
  fragement of lentiviral ENV ISU
AIEKRGKD

SEQ ID NO: 66 - protein, 8 aa, Artificial Sequence
  fragement of lentiviral ENV ISU
AIEKRRKD

SEQ ID NO: 67 - protein, 8 aa, Artificial sequence
  fragement of lentiviral ENV ISU
AIERALKD

SEQ ID NO: 68 - protein, 8 aa, Artificial sequence
  fragement of lentiviral ENV ISU
AIERFLKD

SEQ ID NO: 69 - protein, 8 aa, Artificial sequence
  fragement of lentiviral ENV ISU
AIERGLKD

SEQ ID NO: 70 - protein, 8 aa, Artificial sequence
  fragement of lentiviral ENV ISU
AIERLLKD

SEQ ID NO: 71 - protein, 8 aa, Artificial sequence
  fragement of lentiviral ENV ISU
AIERRLKD

SEQ ID NO: 72 - protein, 8 aa, Artificial sequence
  fragement of lentiviral ENV ISU
AIERYAKD

SEQ ID NO: 73 - protein, 8 aa, Artificial sequence
  fragement of lentiviral ENV ISU
AIERYFKD

SEQ ID NO: 74 - protein, 8 aa, Artificial sequence
  fragement of lentiviral ENV ISU
AIERYGKD

SEQ ID NO: 75 - protein, 8 aa, Artificial sequence
  fragement of lentiviral ENV ISU
AIERYRKD

SEQ ID NO: 76 - protein, 8 aa, Artificial sequence
  fragement of lentiviral ENV ISU
AIERAAKD

SEQ ID NO: 77 - protein, 8 aa, Artificial sequence
  fragement of lentiviral ENV ISU
AIERAFKD

SEQ ID NO: 78 - protein, 8 aa, Artificial sequence
  fragement of lentiviral ENV ISU
AIERAGKD

SEQ ID NO: 79 - protein, 8 aa, Artificial sequence
  fragement of lentiviral ENV ISU
AIERARKD

SEQ ID NO: 80 - protein, 8 aa, Artificial sequence
  fragement of lentiviral ENV ISU
AIERFAKD

SEQ ID NO: 81 - protein, 8 aa, Artificial sequence
  fragement of lentiviral ENV ISU
AIERFFKD

SEQ ID NO: 82 - protein, 8 aa, Artificial sequence
  fragement of lentiviral ENV ISU
AIERFGKD

SEQ ID NO: 83 - protein, 8 aa, Artificial sequence
  fragement of lentiviral ENV ISU
AIERFRKD

SEQ ID NO: 84 - protein, 8 aa, Artificial sequence
  fragement of lentiviral ENV ISU
AIERGAKD

SEQ ID NO: 85 - protein, 8 aa, Artificial sequence
  fragement of lentiviral ENV ISU
AIERGFKD

SEQ ID NO: 86 - protein, 8 aa, Artificial sequence
  fragement of lentiviral ENV ISU
AIERGGKD

SEQ ID NO: 87 - protein, 8 aa, Artificial sequence
  fragement of lentiviral ENV ISU
AIERGRKD

SEQ ID NO: 88 - protein, 8 aa, Artificial sequence
  fragement of lentiviral ENV ISU
AIERLAKD

SEQ ID NO: 89 - protein, 8 aa, Artificial sequence
  fragement of lentiviral ENV ISU
AIERLFKD

SEQ ID NO: 90 - protein, 8 aa, Artificial sequence
  fragement of lentiviral ENV ISU
AIERLGKD

SEQ ID NO: 91 - protein, 8 aa, Artificial sequence
  fragement of lentiviral ENV ISU
AIERLRKD

SEQ ID NO: 92 - protein, 8 aa, Artificial sequence
  fragement of lentiviral ENV ISU
AIERRAKD

SEQ ID NO: 93 - protein, 8 aa, Artificial sequence
  fragement of lentiviral ENV ISU
AIERRFKD

SEQ ID NO: 94 - protein, 8 aa, Artificial sequence
  fragement of lentiviral ENV ISU
AIERRGKD

SEQ ID NO: 95 - protein, 8 aa, Artificial Sequence
  fragement of lentiviral ENV ISU
AIERRRKD

SEQ ID NO: 96 - protein, 49 aa, Artificial Sequence
  fragment of HIV1 ENV ISU
SGIVQQQSNLLRAIQARQHMLQLTVWGIKQLQARVLAVERALKDQQLLG

SEQ ID NO: 97 - protein, 49 aa, Artificial sequence
  fragment of HIV1 ENV ISU
SGIVQQQSNLLRAIQARQHMLQLTVWGIKQLQARVLAVERFLKDQQLLG

SEQ ID NO: 98 - protein, 49 aa, Artificial sequence
  fragment of HIV1 ENV ISU
SGIVQQQSNLLRAIQARQHMLQLTVWGIKQLQARVLAVERGLKDQQLLG

SEQ ID NO: 99 - protein, 49 aa, Artificial sequence
  fragment of HIV1 ENV ISU
SGIVQQQSNLLRAIQARQHMLQLTVWGIKQLQARVLAVERLLKDQQLLG

SEQ ID NO: 100 - protein, 49 aa, Artificial sequence
  fragment of HIV1 ENV ISU
SGIVQQQSNLLRAIQARQHMLQLTVWGIKQLQARVLAVERRLKDQQLLG

SEQ ID NO: 101 - protein, 49 aa, Artificial sequence
  fragment of HIV1 ENV ISU
SGIVQQQSNLLRAIQARQHMLQLTVWGIKQLQARVLAVERYAKDQQLLG

SEQ ID NO: 102 - protein, 49 aa, Artificial sequence
  fragment of HIV1 ENV ISU
SGIVQQQSNLLRAIQARQHMLQLTVWGIKQLQARVLAVERYFKDQQLLG

SEQ ID NO: 103 - protein, 49 aa, Artificial sequence
  fragment of HIV1 ENV ISU
SGIVQQQSNLLRAIQARQHMLQLTVWGIKQLQARVLAVERYGKDQQLLG

SEQ ID NO: 104 - protein, 49 aa, Artificial sequence
  fragment of HIV1 ENV ISU
SGIVQQQSNLLRAIQARQHMLQLTVWGIKQLQARVLAVERYRKDQQLLG

SEQ ID NO: 105 - protein, 49 aa, Artificial sequence
  fragment of HIV1 ENV ISU
SGIVQQQSNLLRAIQARQHMLQLTVWGIKQLQARVLAVERAAKDQQLLG

SEQ ID NO: 106 - protein, 49 aa, Artificial sequence
  fragment of HIV1 ENV ISU
SGIVQQQSNLLRAIQARQHMLQLTVWGIKQLQARVLAVERAFKDQQLLG

SEQ ID NO: 107 - protein, 49 aa, Artificial sequence
  fragment of HIV1 ENV ISU
SGIVQQQSNLLRAIQARQHMLQLTVWGIKQLQARVLAVERAGKDQQLLG

SEQ ID NO: 108 - protein, 49 aa, Artificial sequence
  fragment of HIV1 ENV ISU
SGIVQQQSNLLRAIQARQHMLQLTVWGIKQLQARVLAVERARKDQQLLG

SEQ ID NO: 109 - protein, 49 aa, Artificial sequence
  fragment of HIV1 ENV ISU
SGIVQQQSNLLRAIQARQHMLQLTVWGIKQLQARVLAVERFAKDQQLLG

SEQ ID NO: 110 - protein, 49 aa, Artificial sequence
  fragment of HIV1 ENV ISU
SGIVQQQSNLLRAIQARQHMLQLTVWGIKQLQARVLAVERFFKDQQLLG

SEQ ID NO: 111 - protein, 49 aa, Artificial sequence
  fragment of HIV1 ENV ISU
SGIVQQQSNLLRAIQARQHMLQLTVWGIKQLQARVLAVERFGKDQQLLG

SEQ ID NO: 112 - protein, 49 aa, Artificial sequence
  fragment of HIV1 ENV ISU
SGIVQQQSNLLRAIQARQHMLQLTVWGIKQLQARVLAVERFRKDQQLLG

SEQ ID NO: 113 - protein, 49 aa, Artificial sequence
  fragment of HIV1 ENV ISU
SGIVQQQSNLLRAIQARQHMLQLTVWGIKQLQARVLAVERGAKDQQLLG

SEQ ID NO: 114 - protein, 49 aa, Artificial sequence
  fragment of HIV1 ENV ISU
SGIVQQQSNLLRAIQARQHMLQLTVWGIKQLQARVLAVERGFKDQQLLG

SEQ ID NO: 115 - protein, 49 aa, Artificial sequence
  fragment of HIV1 ENV ISU
SGIVQQQSNLLRAIQARQHMLQLTVWGIKQLQARVLAVERGGKDQQLLG

SEQ ID NO: 116 - protein, 49 aa, Artificial sequence
  fragment of HIV1 ENV ISU
SGIVQQQSNLLRAIQARQHMLQLTVWGIKQLQARVLAVERGRKDQQLLG

SEQ ID NO: 117 - protein, 49 aa, Artificial sequence
  fragment of HIV1 ENV ISU
SGIVQQQSNLLRAIQARQHMLQLTVWGIKQLQARVLAVERLAKDQQLLG

SEQ ID NO: 118 - protein, 49 aa, Artificial sequence
  fragment of HIV1 ENV ISU
SGIVQQQSNLLRAIQARQHMLQLTVWGIKQLQARVLAVERLFKDQQLLG

SEQ ID NO: 119 - protein, 49 aa, Artificial sequence
  fragment of HIV1 ENV ISU
SGIVQQQSNLLRAIQARQHMLQLTVWGIKQLQARVLAVERLGKDQQLLG

SEQ ID NO: 120 - protein, 49 aa, Artificial sequence
  fragment of HIV1 ENV ISU
SGIVQQQSNLLRAIQARQHMLQLTVWGIKQLQARVLAVERLRKDQQLLG

SEQ ID NO: 121 - protein, 49 aa, Artificial sequence
  fragment of HIV1 ENV ISU
SGIVQQQSNLLRAIQARQHMLQLTVWGIKQLQARVLAVERRAKDQQLLG

SEQ ID NO: 122 - protein, 49 aa, Artificial sequence
  fragment of HIV1 ENV ISU
SGIVQQQSNLLRAIQARQHMLQLTVWGIKQLQARVLAVERRFKDQQLLG

SEQ ID NO: 123 - protein, 49 aa, Artificial sequence
  fragment of HIV1 ENV ISU
SGIVQQQSNLLRAIQARQHMLQLTVWGIKQLQARVLAVERRGKDQQLLG

SEQ ID NO: 124 - protein, 49 aa, Artificial sequence
  fragment of HIV1 ENV ISU
SGIVQQQSNLLRAIQARQHMLQLTVWGIKQLQARVLAVERRRKDQQLLG

SEQ ID NO: 125 - protein, 57 aa, Artificial sequence
  fragment of HIV2 ENV ISU
AGIVQQQQQLLDVVKRQQEMLRLTVWGTKNLQARVTAIEKALKDQAQLNSWGCAFRQ

SEQ ID NO: 126 - protein, 57 aa, Artificial sequence
  fragment of HIV2 ENV ISU
AGIVQQQQQLLDVVKRQQEMLRLTVWGTKNLQARVTAIEKFLKDQAQLNSWGCAFRQ

SEQ ID NO: 127 - protein, 57 aa, Artificial sequence
  fragment of HIV2 ENV ISU
AGIVQQQQQLLDVVKRQQEMLRLTVWGTKNLQARVTAIEKGLKDQAQLNSWGCAFRQ

SEQ ID NO: 128 - protein, 57 aa, Artificial sequence
  fragment of HIV2 ENV ISU
AGIVQQQQQLLDVVKRQQEMLRLTVWGTKNLQARVTAIEKLLKDQAQLNSWGCAFRQ

SEQ ID NO: 129 - protein, 57 aa, Artificial sequence
  fragment of HIV2 ENV ISU
AGIVQQQQQLLDVVKRQQEMLRLTVWGTKNLQARVTAIEKRLKDQAQLNSWGCAFRQ

SEQ ID NO: 130 - protein, 57 aa, Artificial sequence
  fragment of HIV2 ENV ISU
AGIVQQQQQLLDVVKRQQEMLRLTVWGTKNLQARVTAIEKYAKDQAQLNSWGCAFRQ

SEQ ID NO: 131 - protein, 57 aa, Artificial sequence
  fragment of HIV2 ENV ISU
AGIVQQQQQLLDVVKRQQEMLRLTVWGTKNLQARVTAIEKYFKDQAQLNSWGCAFRQ

SEQ ID NO: 132 - protein, 57 aa, Artificial sequence
  fragment of HIV2 ENV ISU
AGIVQQQQQLLDVVKRQQEMLRLTVWGTKNLQARVTAIEKYGKDQAQLNSWGCAFRQ

SEQ ID NO: 133 - protein, 57 aa, Artificial sequence
  fragment of HIV2 ENV ISU
AGIVQQQQQLLDVVKRQQEMLRLTVWGTKNLQARVTAIEKYRKDQAQLNSWGCAFRQ

SEQ ID NO: 134 - protein, 57 aa, Artificial sequence
  fragment of HIV2 ENV ISU
AGIVQQQQQLLDVVKRQQEMLRLTVWGTKNLQARVTAIEKAAKDQAQLNSWGCAFRQ

SEQ ID NO: 135 - protein, 57 aa, Artificial sequence
  fragment of HIV2 ENV ISU
AGIVQQQQQLLDVVKRQQEMLRLTVWGTKNLQARVTAIEKAFKDQAQLNSWGCAFRQ

SEQ ID NO: 136 - protein, 57 aa, Artificial sequence
  fragment of HIV2 ENV ISU
AGIVQQQQQLLDVVKRQQEMLRLTVWGTKNLQARVTAIEKAGKDQAQLNSWGCAFRQ

SEQ ID NO: 137 - protein, 57 aa, Artificial sequence
  fragment of HIV2 ENV ISU
AGIVQQQQQLLDVVKRQQEMLRLTVWGTKNLQARVTAIEKARKDQAQLNSWGCAFRQ

SEQ ID NO: 138 - protein, 57 aa, Artificial sequence
  fragment of HIV2 ENV ISU
AGIVQQQQQLLDVVKRQQEMLRLTVWGTKNLQARVTAIEKFAKDQAQLNSWGCAFRQ

SEQ ID NO: 139 - protein, 57 aa, Artificial sequence
  fragment of HIV2 ENV ISU
AGIVQQQQQLLDVVKRQQEMLRLTVWGTKNLQARVTAIEKFFKDQAQLNSWGCAFRQ

SEQ ID NO: 140 - protein, 57 aa, Artificial sequence
  fragment of HIV2 ENV ISU
AGIVQQQQQLLDVVKRQQEMLRLTVWGTKNLQARVTAIEKFGKDQAQLNSWGCAFRQ

SEQ ID NO: 141 - protein, 57 aa, Artificial sequence
  fragment of HIV2 ENV ISU
AGIVQQQQQLLDVVKRQQEMLRLTVWGTKNLQARVTAIEKFRKDQAQLNSWGCAFRQ

SEQ ID NO: 142 - protein, 57 aa, Artificial sequence
  fragment of HIV2 ENV ISU
AGIVQQQQQLLDVVKRQQEMLRLTVWGTKNLQARVTAIEKGAKDQAQLNSWGCAFRQ

SEQ ID NO: 143 - protein, 57 aa, Artificial sequence
  fragment of HIV2 ENV ISU
AGIVQQQQQLLDVVKRQQEMLRLTVWGTKNLQARVTAIEKGFKDQAQLNSWGCAFRQ

SEQ ID NO: 144 - protein, 57 aa, Artificial sequence
  fragment of HIV2 ENV ISU
AGIVQQQQQLLDVVKRQQEMLRLTVWGTKNLQARVTAIEKGGKDQAQLNSWGCAFRQ

SEQ ID NO: 145 - protein, 57 aa, Artificial sequence
  fragment of HIV2 ENV ISU
AGIVQQQQQLLDVVKRQQEMLRLTVWGTKNLQARVTAIEKGRKDQAQLNSWGCAFRQ

SEQ ID NO: 146 - protein, 57 aa, Artificial sequence
  fragment of HIV2 ENV ISU
AGIVQQQQQLLDVVKRQQEMLRLTVWGTKNLQARVTAIEKLAKDQAQLNSWGCAFRQ

SEQ ID NO: 147 - protein, 57 aa, Artificial sequence
  fragment of HIV2 ENV ISU
AGIVQQQQQLLDVVKRQQEMLRLTVWGTKNLQARVTAIEKLFKDQAQLNSWGCAFRQ

SEQ ID NO: 148 - protein, 57 aa, Artificial sequence
  fragment of HIV2 ENV ISU
AGIVQQQQQLLDVVKRQQEMLRLTVWGTKNLQARVTAIEKLGKDQAQLNSWGCAFRQ

SEQ ID NO: 149 - protein, 57 aa, Artificial sequence
  fragment of HIV2 ENV ISU
AGIVQQQQQLLDVVKRQQEMLRLTVWGTKNLQARVTAIEKLRKDQAQLNSWGCAFRQ

SEQ ID NO: 150 - protein, 57 aa, Artificial sequence
  fragment of HIV2 ENV ISU
AGIVQQQQQLLDVVKRQQEMLRLTVWGTKNLQARVTAIEKRAKDQAQLNSWGCAFRQ

SEQ ID NO: 151 - protein, 57 aa, Artificial sequence
  fragment of HIV2 ENV ISU
AGIVQQQQQLLDVVKRQQEMLRLTVWGTKNLQARVTAIEKRFKDQAQLNSWGCAFRQ

SEQ ID NO: 152 - protein, 57 aa, Artificial sequence
  fragment of HIV2 ENV ISU
AGIVQQQQQLLDVVKRQQEMLRLTVWGTKNLQARVTAIEKRGKDQAQLNSWGCAFRQ

SEQ ID NO: 153 - protein, 57 aa, Artificial Sequence
  fragment of HIV2 ENV ISU
AGIVQQQQQLLDVVKRQQEMLRLTVWGTKNLQARVTAIEKRRKDQAQLNSWGCAFRQ

SEQ ID NO: 154 - protein, 57 aa, Artificial sequence
  fragment of HIV2 ENV ISU
AGIVQQQQQLLDVVKRQQELLRLTVWGTKNLQARVTAIEKALQDQARLNSWGCAFRQ

SEQ ID NO: 155 - protein, 57 aa, Artificial sequence
  fragment of HIV2 ENV ISU
AGIVQQQQQLLDVVKRQQELLRLTVWGTKNLQARVTAIEKFLQDQARLNSWGCAFRQ

SEQ ID NO: 156 - protein, 57 aa, Artificial sequence
  fragment of HIV2 ENV ISU
AGIVQQQQQLLDVVKRQQELLRLTVWGTKNLQARVTAIEKGLQDQARLNSWGCAFRQ

SEQ ID NO: 157 - protein, 57 aa, Artificial sequence
  fragment of HIV2 ENV ISU
AGIVQQQQQLLDVVKRQQELLRLTVWGTKNLQARVTAIEKLLQDQARLNSWGCAFRQ

SEQ ID NO: 158 - protein, 57 aa, Artificial sequence
  fragment of HIV2 ENV ISU
AGIVQQQQQLLDVVKRQQELLRLTVWGTKNLQARVTAIEKRLQDQARLNSWGCAFRQ

SEQ ID NO: 159 - protein, 57 aa, Artificial sequence
  fragment of HIV2 ENV ISU
AGIVQQQQQLLDVVKRQQELLRLTVWGTKNLQARVTAIEKYAQDQARLNSWGCAFRQ

SEQ ID NO: 160 - protein, 57 aa, Artificial sequence
  fragment of HIV2 ENV ISU
AGIVQQQQQLLDVVKRQQELLRLTVWGTKNLQARVTAIEKYFQDQARLNSWGCAFRQ

SEQ ID NO: 161 - protein, 57 aa, Artificial sequence
  fragment of HIV2 ENV ISU
AGIVQQQQQLLDVVKRQQELLRLTVWGTKNLQARVTAIEKYGQDQARLNSWGCAFRQ

SEQ ID NO: 162 - protein, 57 aa, Artificial sequence
  fragment of HIV2 ENV ISU
AGIVQQQQQLLDVVKRQQELLRLTVWGTKNLQARVTAIEKYRQDQARLNSWGCAFRQ

SEQ ID NO: 163 - protein, 57 aa, Artificial sequence
  fragment of HIV2 ENV ISU
AGIVQQQQQLLDVVKRQQELLRLTVWGTKNLQARVTAIEKAAQDQARLNSWGCAFRQ

SEQ ID NO: 164 - protein, 57 aa, Artificial sequence
  fragment of HIV2 ENV ISU
AGIVQQQQQLLDVVKRQQELLRLTVWGTKNLQARVTAIEKAFQDQARLNSWGCAFRQ

SEQ ID NO: 165 - protein, 57 aa, Artificial sequence
  fragment of HIV2 ENV ISU
AGIVQQQQQLLDVVKRQQELLRLTVWGTKNLQARVTAIEKAGQDQARLNSWGCAFRQ

SEQ ID NO: 166 - protein, 57 aa, Artificial sequence
  fragment of HIV2 ENV ISU
AGIVQQQQQLLDVVKRQQELLRLTVWGTKNLQARVTAIEKARQDQARLNSWGCAFRQ

SEQ ID NO: 167 - protein, 57 aa, Artificial sequence
  fragment of HIV2 ENV ISU
AGIVQQQQQLLDVVKRQQELLRLTVWGTKNLQARVTAIEKFAQDQARLNSWGCAFRQ

SEQ ID NO: 168 - protein, 57 aa, Artificial sequence
  fragment of HIV2 ENV ISU
AGIVQQQQQLLDVVKRQQELLRLTVWGTKNLQARVTAIEKFFQDQARLNSWGCAFRQ

SEQ ID NO: 169 - protein, 57 aa, Artificial sequence
  fragment of HIV2 ENV ISU
AGIVQQQQQLLDVVKRQQELLRLTVWGTKNLQARVTAIEKFGQDQARLNSWGCAFRQ

SEQ ID NO: 170 - protein, 57 aa, Artificial sequence
  fragment of HIV2 ENV ISU
AGIVQQQQQLLDVVKRQQELLRLTVWGTKNLQARVTAIEKFRQDQARLNSWGCAFRQ

SEQ ID NO: 171 - protein, 57 aa, Artificial sequence
  fragment of HIV2 ENV ISU
AGIVQQQQQLLDVVKRQQELLRLTVWGTKNLQARVTAIEKGAQDQARLNSWGCAFRQ

SEQ ID NO: 172 - protein, 57 aa, Artificial sequence
  fragment of HIV2 ENV ISU
AGIVQQQQQLLDVVKRQQELLRLTVWGTKNLQARVTAIEKGFQDQARLNSWGCAFRQ

SEQ ID NO: 173 - protein, 57 aa, Artificial sequence
  fragment of HIV2 ENV ISU
AGIVQQQQQLLDVVKRQQELLRLTVWGTKNLQARVTAIEKGGQDQARLNSWGCAFRQ

SEQ ID NO: 174 - protein, 57 aa, Artificial sequence
  fragment of HIV2 ENV ISU
AGIVQQQQQLLDVVKRQQELLRLTVWGTKNLQARVTAIEKGRQDQARLNSWGCAFRQ

SEQ ID NO: 175 - protein, 57 aa, Artificial sequence
  fragment of HIV2 ENV ISU
AGIVQQQQQLLDVVKRQQELLRLTVWGTKNLQARVTAIEKLAQDQARLNSWGCAFRQ

SEQ ID NO: 176 - protein, 57 aa, Artificial sequence
  fragment of HIV2 ENV ISU
AGIVQQQQQLLDVVKRQQELLRLTVWGTKNLQARVTAIEKLFQDQARLNSWGCAFRQ

SEQ ID NO: 177 - protein, 57 aa, Artificial sequence
  fragment of HIV2 ENV ISU
AGIVQQQQQLLDVVKRQQELLRLTVWGTKNLQARVTAIEKLGQDQARLNSWGCAFRQ

SEQ ID NO: 178 - protein, 57 aa, Artificial sequence
  fragment of HIV2 ENV ISU
AGIVQQQQQLLDVVKRQQELLRLTVWGTKNLQARVTAIEKLRQDQARLNSWGCAFRQ

SEQ ID NO: 179 - protein, 57 aa, Artificial sequence
  fragment of HIV2 ENV ISU
AGIVQQQQQLLDVVKRQQELLRLTVWGTKNLQARVTAIEKRAQDQARLNSWGCAFRQ

SEQ ID NO: 180 - protein, 57 aa, Artificial sequence
  fragment of HIV2 ENV ISU
AGIVQQQQQLLDVVKRQQELLRLTVWGTKNLQARVTAIEKRFQDQARLNSWGCAFRQ

SEQ ID NO: 181 - protein, 57 aa, Artificial sequence
  fragment of HIV2 ENV ISU
AGIVQQQQQLLDVVKRQQELLRLTVWGTKNLQARVTAIEKRGQDQARLNSWGCAFRQ

SEQ ID NO: 182 - protein, 57 aa, Artificial Sequence
  fragment of HIV2 ENV ISU
AGIVQQQQQLLDVVKRQQELLRLTVWGTKNLQARVTAIEKRRQDQARLNSWGCAFRQ

SEQ ID NO: 183 - protein, 57 aa, Artificial sequence
  fragment of SIV ENV ISU
AGIVQQQQQLLDVVKRQQELLRLTVWGTKNLQTRVTAIEKALKDQAQLNAWGCAFRQ

SEQ ID NO: 184 - protein, 57 aa, Artificial sequence
  fragment of SIV ENV ISU
AGIVQQQQQLLDVVKRQQELLRLTVWGTKNLQTRVTAIEKFLKDQAQLNAWGCAFRQ

SEQ ID NO: 185 - protein, 57 aa, Artificial sequence
  fragment of SIV ENV ISU
AGIVQQQQQLLDVVKRQQELLRLTVWGTKNLQTRVTAIEKGLKDQAQLNAWGCAFRQ

SEQ ID NO: 186 - protein, 57 aa, Artificial sequence
  fragment of SIV ENV ISU
AGIVQQQQQLLDVVKRQQELLRLTVWGTKNLQTRVTAIEKLLKDQAQLNAWGCAFRQ

SEQ ID NO: 187 - protein, 57 aa, Artificial sequence
  fragment of SIV ENV ISU
AGIVQQQQQLLDVVKRQQELLRLTVWGTKNLQTRVTAIEKRLKDQAQLNAWGCAFRQ

SEQ ID NO: 188 - protein, 57 aa, Artificial sequence
  fragment of SIV ENV ISU
AGIVQQQQQLLDVVKRQQELLRLTVWGTKNLQTRVTAIEKYAKDQAQLNAWGCAFRQ

SEQ ID NO: 189 - protein, 57 aa, Artificial sequence
  fragment of SIV ENV ISU
AGIVQQQQQLLDVVKRQQELLRLTVWGTKNLQTRVTAIEKYFKDQAQLNAWGCAFRQ

SEQ ID NO: 190 - protein, 57 aa, Artificial sequence
  fragment of SIV ENV ISU
AGIVQQQQQLLDVVKRQQELLRLTVWGTKNLQTRVTAIEKYGKDQAQLNAWGCAFRQ

SEQ ID NO: 191 - protein, 57 aa, Artificial sequence
  fragment of SIV ENV ISU
AGIVQQQQQLLDVVKRQQELLRLTVWGTKNLQTRVTAIEKYRKDQAQLNAWGCAFRQ

SEQ ID NO: 192 - protein, 57 aa, Artificial sequence
  fragment of SIV ENV ISU
AGIVQQQQQLLDVVKRQQELLRLTVWGTKNLQTRVTAIEKAAKDQAQLNAWGCAFRQ

SEQ ID NO: 193 - protein, 57 aa, Artificial sequence
  fragment of SIV ENV ISU
AGIVQQQQQLLDVVKRQQELLRLTVWGTKNLQTRVTAIEKAFKDQAQLNAWGCAFRQ

SEQ ID NO: 194 - protein, 57 aa, Artificial sequence
  fragment of SIV ENV ISU
AGIVQQQQQLLDVVKRQQELLRLTVWGTKNLQTRVTAIEKAGKDQAQLNAWGCAFRQ

SEQ ID NO: 195 - protein, 57 aa, Artificial sequence
  fragment of SIV ENV ISU
AGIVQQQQQLLDVVKRQQELLRLTVWGTKNLQTRVTAIEKARKDQAQLNAWGCAFRQ

SEQ ID NO: 196 - protein, 57 aa, Artificial sequence
  fragment of SIV ENV ISU
AGIVQQQQQLLDVVKRQQELLRLTVWGTKNLQTRVTAIEKFAKDQAQLNAWGCAFRQ

SEQ ID NO: 197 - protein, 57 aa, Artificial sequence
  fragment of SIV ENV ISU
AGIVQQQQQLLDVVKRQQELLRLTVWGTKNLQTRVTAIEKFFKDQAQLNAWGCAFRQ

SEQ ID NO: 198 - protein, 57 aa, Artificial sequence
  fragment of SIV ENV ISU
AGIVQQQQQLLDVVKRQQELLRLTVWGTKNLQTRVTAIEKFGKDQAQLNAWGCAFRQ

SEQ ID NO: 199 - protein, 57 aa, Artificial sequence
  fragment of SIV ENV ISU
AGIVQQQQQLLDVVKRQQELLRLTVWGTKNLQTRVTAIEKFRKDQAQLNAWGCAFRQ

SEQ ID NO: 200 - protein, 57 aa, Artificial sequence
  fragment of SIV ENV ISU
AGIVQQQQQLLDVVKRQQELLRLTVWGTKNLQTRVTAIEKGAKDQAQLNAWGCAFRQ

SEQ ID NO: 201 - protein, 57 aa, Artificial sequence
  fragment of SIV ENV ISU
AGIVQQQQQLLDVVKRQQELLRLTVWGTKNLQTRVTAIEKGFKDQAQLNAWGCAFRQ

SEQ ID NO: 202 - protein, 57 aa, Artificial sequence
  fragment of SIV ENV ISU
AGIVQQQQQLLDVVKRQQELLRLTVWGTKNLQTRVTAIEKGGKDQAQLNAWGCAFRQ

SEQ ID NO: 203 - protein, 57 aa, Artificial sequence
  fragment of SIV ENV ISU
AGIVQQQQQLLDVVKRQQELLRLTVWGTKNLQTRVTAIEKGRKDQAQLNAWGCAFRQ

SEQ ID NO: 204 - protein, 57 aa, Artificial sequence
  fragment of SIV ENV ISU
AGIVQQQQQLLDVVKRQQELLRLTVWGTKNLQTRVTAIEKLAKDQAQLNAWGCAFRQ

SEQ ID NO: 205 - protein, 57 aa, Artificial sequence
  fragment of SIV ENV ISU
AGIVQQQQQLLDVVKRQQELLRLTVWGTKNLQTRVTAIEKLFKDQAQLNAWGCAFRQ

SEQ ID NO: 206 - protein, 57 aa, Artificial sequence
  fragment of SIV ENV ISU
AGIVQQQQQLLDVVKRQQELLRLTVWGTKNLQTRVTAIEKLGKDQAQLNAWGCAFRQ

SEQ ID NO: 207 - protein, 57 aa, Artificial sequence
  fragment of SIV ENV ISU
AGIVQQQQQLLDVVKRQQELLRLTVWGTKNLQTRVTAIEKLRKDQAQLNAWGCAFRQ

SEQ ID NO: 208 - protein, 57 aa, Artificial sequence
  fragment of SIV ENV ISU
AGIVQQQQQLLDVVKRQQELLRLTVWGTKNLQTRVTAIEKRAKDQAQLNAWGCAFRQ

SEQ ID NO: 209 - protein, 57 aa, Artificial sequence
  fragment of SIV ENV ISU
AGIVQQQQQLLDVVKRQQELLRLTVWGTKNLQTRVTAIEKRFKDQAQLNAWGCAFRQ

SEQ ID NO: 210 - protein, 57 aa, Artificial sequence
  fragment of SIV ENV ISU
AGIVQQQQQLLDVVKRQQELLRLTVWGTKNLQTRVTAIEKRGKDQAQLNAWGCAFRQ

SEQ ID NO: 211 - protein, 57 aa, Artificial Sequence
  fragment of SIV ENV ISU
AGIVQQQQQLLDVVKRQQELLRLTVWGTKNLQTRVTAIEKRRKDQAQLNAWGCAFRQ

SEQ ID NO: 212 - protein, 861 aa, Human immunodeficiency virus type 1
MRVKEKYQHLWRWGWKWGTMLLGILMICSATEKLWVTVYYGVPVWKEATTTLFCASDAKAYDTEVHNVWATHACVPTDPNPQEVVLVNVTENFNMWKNDMVEQMHEDIISLWDQSLKPCVKLTPLCVSLKCTDLGNATNTNSSNTNSSSGEMMMEKGEIKNCSFNISTSIRGKVQKEYAFFYKLDIIPIDNDTTSYTLTSCNTSVITQACPKVSFEPIPIHYCAPAGFAILKCNNKTFNGTGPCTNVSTVQCTHGIRPVVSTQLLLNGSLAEEEVVIRSANFTDNAKTIIVQLNQSVEINCTRPNNNTRKSIRIQRGPGRAFVTIGKIGNMRQAHCNISRAKWNATLKQIASKLREQFGNNKTIIFKQSSGGDPEIVTHSFNCGGEFFYCNSTQLFNSTWFNSTWSTEGSNNTEGSDTITLPCRIKQFINMWQEVGKAMYAPPISGQIRCSSNITGLLLTRDGGNNNNGSEIFRPGGGDMRDNWRSELYKYKVVKIEPLGVAPTKAKRRVVQREKRAVGIGALFLGFLGAAGSTMGARSMTLTVQARQLLSGIVQQQNNLLRAIEAQQHLLQLTVWGIKQLQARILAVERALKDQQLLGIWGCSGKLICTTAVPWNASWSNKSLEQIWNNMTWMEWDREINNYTSLIHSLIEESQNQQEKNEQELLELDKWASLWNWFNITNWLWYIKIFIMIVGGLVGLRIVFAVLSIVNRVRQGYSPLSFQTHLPTPRGPDRPEGIEEEGGERDRDRSIRLVNGSLALIWDDLRSLCLFSYHRLRDLLLIVTRIVELLGRRGWEALKYWWNLLQYWSQELKNSAVSLLNATAIAVAEGTDRVIEVVQGACRAIRHIPRRIRQGLERILL

SEQ ID NO: 213 - protein, 861 aa, Human immunodeficiency virus type 1
MRVKEKYQHLWRWGWKWGTMLLGILMICSATEKLWVTVYYGVPVWKEATTTLFCASDAKAYDTEVHNVWATHACVPTDPNPQEVVLVNVTENFNMWKNDMVEQMHEDIISLWDQSLKPCVKLTPLCVSLKCTDLGNATNTNSSNTNSSSGEMMMEKGEIKNCSFNISTSIRGKVQKEYAFFYKLDIIPIDNDTTSYTLTSCNTSVITQACPKVSFEPIPIHYCAPAGFAILKCNNKTFNGTGPCTNVSTVQCTHGIRPVVSTQLLLNGSLAEEEVVIRSANFTDNAKTIIVQLNQSVEINCTRPNNNTRKSIRIQRGPGRAFVTIGKIGNMRQAHCNISRAKWNATLKQIASKLREQFGNNKTIIFKQSSGGDPEIVTHSFNCGGEFFYCNSTQLFNSTWFNSTWSTEGSNNTEGSDTITLPCRIKQFINMWQEVGKAMYAPPISGQIRCSSNITGLLLTRDGGNNNNGSEIFRPGGGDMRDNWRSELYKYKVVKIEPLGVAPTKAKRRVVQREKRAVGIGALFLGFLGAAGSTMGARSMTLTVQARQLLSGIVQQQNNLLRAIEAQQHLLQLTVWGIKQLQARILAVERFLKDQQLLGIWGCSGKLICTTAVPWNASWSNKSLEQIWNNMTWMEWDREINNYTSLIHSLIEESQNQQEKNEQELLELDKWASLWNWFNITNWLWYIKIFIMIVGGLVGLRIVFAVLSIVNRVRQGYSPLSFQTHLPTPRGPDRPEGIEEEGGERDRDRSIRLVNGSLALIWDDLRSLCLFSYHRLRDLLLIVTRIVELLGRRGWEALKYWWNLLQYWSQELKNSAVSLLNATAIAVAEGTDRVIEVVQGACRAIRHIPRRIRQGLERILL

SEQ ID NO: 214 - protein, 861 aa, Human immunodeficiency virus type 1
MRVKEKYQHLWRWGWKWGTMLLGILMICSATEKLWVTVYYGVPVWKEATTTLFCASDAKAYDTEVHNVWATHACVPTDPNPQEVVLVNVTENFNMWKNDMVEQMHEDIISLWDQSLKPCVKLTPLCVSLKCTDLGNATNTNSSNTNSSSGEMMMEKGEIKNCSFNISTSIRGKVQKEYAFFYKLDIIPIDNDTTSYTLTSCNTSVITQACPKVSFEPIPIHYCAPAGFAILKCNNKTFNGTGPCTNVSTVQCTHGIRPVVSTQLLLNGSLAEEEVVIRSANFTDNAKTIIVQLNQSVEINCTRPNNNTRKSIRIQRGPGRAFVTIGKIGNMRQAHCNISRAKWNATLKQIASKLREQFGNNKTIIFKQSSGGDPEIVTHSFNCGGEFFYCNSTQLFNSTWFNSTWSTEGSNNTEGSDTITLPCRIKQFINMWQEVGKAMYAPPISGQIRCSSNITGLLLTRDGGNNNNGSEIFRPGGGDMRDNWRSELYKYKVVKIEPLGVAPTKAKRRVVQREKRAVGIGALFLGFLGAAGSTMGARSMTLTVQARQLLSGIVQQQNNLLRAIEAQQHLLQLTVWGIKQLQARILAVERGLKDQQLLGIWGCSGKLICTTAVPWNASWSNKSLEQIWNNMTWMEWDREINNYTSLIHSLIEESQNQQEKNEQELLELDKWASLWNWFNITNWLWYIKIFIMIVGGLVGLRIVFAVLSIVNRVRQGYSPLSFQTHLPTPRGPDRPEGIEEEGGERDRDRSIRLVNGSLALIWDDLRSLCLFSYHRLRDLLLIVTRIVELLGRRGWEALKYWWNLLQYWSQELKNSAVSLLNATAIAVAEGTDRVIEVVQGACRAIRHIPRRIRQGLERILL

SEQ ID NO: 215 - protein, 861 aa, Human immunodeficiency virus type 1
MRVKEKYQHLWRWGWKWGTMLLGILMICSATEKLWVTVYYGVPVWKEATTTLFCASDAKAYDTEVHNVWATHACVPTDPNPQEVVLVNVTENFNMWKNDMVEQMHEDIISLWDQSLKPCVKLTPLCVSLKCTDLGNATNTNSSNTNSSSGEMMMEKGEIKNCSFNISTSIRGKVQKEYAFFYKLDIIPIDNDTTSYTLTSCNTSVITQACPKVSFEPIPIHYCAPAGFAILKCNNKTFNGTGPCTNVSTVQCTHGIRPVVSTQLLLNGSLAEEEVVIRSANFTDNAKTIIVQLNQSVEINCTRPNNNTRKSIRIQRGPGRAFVTIGKIGNMRQAHCNISRAKWNATLKQIASKLREQFGNNKTIIFKQSSGGDPEIVTHSFNCGGEFFYCNSTQLFNSTWFNSTWSTEGSNNTEGSDTITLPCRIKQFINMWQEVGKAMYAPPISGQIRCSSNITGLLLTRDGGNNNNGSEIFRPGGGDMRDNWRSELYKYKVVKIEPLGVAPTKAKRRVVQREKRAVGIGALFLGFLGAAGSTMGARSMTLTVQARQLLSGIVQQQNNLLRAIEAQQHLLQLTVWGIKQLQARILAVERLLKDQQLLGIWGCSGKLICTTAVPWNASWSNKSLEQIWNNMTWMEWDREINNYTSLIHSLIEESQNQQEKNEQELLELDKWASLWNWFNITNWLWYIKIFIMIVGGLVGLRIVFAVLSIVNRVRQGYSPLSFQTHLPTPRGPDRPEGIEEEGGERDRDRSIRLVNGSLALIWDDLRSLCLFSYHRLRDLLLIVTRIVELLGRRGWEALKYWWNLLQYWSQELKNSAVSLLNATAIAVAEGTDRVIEVVQGACRAIRHIPRRIRQGLERILL

SEQ ID NO: 216 - protein, 861 aa, Human immunodeficiency virus type 1
MRVKEKYQHLWRWGWKWGTMLLGILMICSATEKLWVTVYYGVPVWKEATTTLFCASDAKAYDTEVHNVWATHACVPTDPNPQEVVLVNVTENFNMWKNDMVEQMHEDIISLWDQSLKPCVKLTPLCVSLKCTDLGNATNTNSSNTNSSSGEMMMEKGEIKNCSFNISTSIRGKVQKEYAFFYKLDIIPIDNDTTSYTLTSCNTSVITQACPKVSFEPIPIHYCAPAGFAILKCNNKTFNGTGPCTNVSTVQCTHGIRPVVSTQLLLNGSLAEEEVVIRSANFTDNAKTIIVQLNQSVEINCTRPNNNTRKSIRIQRGPGRAFVTIGKIGNMRQAHCNISRAKWNATLKQIASKLREQFGNNKTIIFKQSSGGDPEIVTHSFNCGGEFFYCNSTQLFNSTWFNSTWSTEGSNNTEGSDTITLPCRIKQFINMWQEVGKAMYAPPISGQIRCSSNITGLLLTRDGGNNNNGSEIFRPGGGDMRDNWRSELYKYKVVKIEPLGVAPTKAKRRVVQREKRAVGIGALFLGFLGAAGSTMGARSMTLTVQARQLLSGIVQQQNNLLRAIEAQQHLLQLTVWGIKQLQARILAVERRLKDQQLLGIWGCSGKLICTTAVPWNASWSNKSLEQIWNNMTWMEWDREINNYTSLIHSLIEESQNQQEKNEQELLELDKWASLWNWFNITNWLWYIKIFIMIVGGLVGLRIVFAVLSIVNRVRQGYSPLSFQTHLPTPRGPDRPEGIEEEGGERDRDRSIRLVNGSLALIWDDLRSLCLFSYHRLRDLLLIVTRIVELLGRRGWEALKYWWNLLQYWSQELKNSAVSLLNATAIAVAEGTDRVIEVVQGACRAIRHIPRRIRQGLERILL

SEQ ID NO: 217 - protein, 861 aa, Human immunodeficiency virus type 1
MRVKEKYQHLWRWGWKWGTMLLGILMICSATEKLWVTVYYGVPVWKEATTTLFCASDAKAYDTEVHNVWATHACVPTDPNPQEVVLVNVTENFNMWKNDMVEQMHEDIISLWDQSLKPCVKLTPLCVSLKCTDLGNATNTNSSNTNSSSGEMMMEKGEIKNCSFNISTSIRGKVQKEYAFFYKLDIIPIDNDTTSYTLTSCNTSVITQACPKVSFEPIPIHYCAPAGFAILKCNNKTFNGTGPCTNVSTVQCTHGIRPVVSTQLLLNGSLAEEEVVIRSANFTDNAKTIIVQLNQSVEINCTRPNNNTRKSIRIQRGPGRAFVTIGKIGNMRQAHCNISRAKWNATLKQIASKLREQFGNNKTIIFKQSSGGDPEIVTHSFNCGGEFFYCNSTQLFNSTWFNSTWSTEGSNNTEGSDTITLPCRIKQFINMWQEVGKAMYAPPISGQIRCSSNITGLLLTRDGGNNNNGSEIFRPGGGDMRDNWRSELYKYKVVKIEPLGVAPTKAKRRVVQREKRAVGIGALFLGFLGAAGSTMGARSMTLTVQARQLLSGIVQQQNNLLRAIEAQQHLLQLTVWGIKQLQARILAVERYAKDQQLLGIWGCSGKLICTTAVPWNASWSNKSLEQIWNNMTWMEWDREINNYTSLIHSLIEESQNQQEKNEQELLELDKWASLWNWFNITNWLWYIKIFIMIVGGLVGLRIVFAVLSIVNRVRQGYSPLSFQTHLPTPRGPDRPEGIEEEGGERDRDRSIRLVNGSLALIWDDLRSLCLFSYHRLRDLLLIVTRIVELLGRRGWEALKYWWNLLQYWSQELKNSAVSLLNATAIAVAEGTDRVIEVVQGACRAIRHIPRRIRQGLERILL

SEQ ID NO: 218 - protein, 861 aa, Human immunodeficiency virus type 1
MRVKEKYQHLWRWGWKWGTMLLGILMICSATEKLWVTVYYGVPVWKEATTTLFCASDAKAYDTEVHNVWATHACVPTDPNPQEVVLVNVTENFNMWKNDMVEQMHEDIISLWDQSLKPCVKLTPLCVSLKCTDLGNATNTNSSNTNSSSGEMMMEKGEIKNCSFNISTSIRGKVQKEYAFFYKLDIIPIDNDTTSYTLTSCNTSVITQACPKVSFEPIPIHYCAPAGFAILKCNNKTFNGTGPCTNVSTVQCTHGIRPVVSTQLLLNGSLAEEEVVIRSANFTDNAKTIIVQLNQSVEINCTRPNNNTRKSIRIQRGPGRAFVTIGKIGNMRQAHCNISRAKWNATLKQIASKLREQFGNNKTIIFKQSSGGDPEIVTHSFNCGGEFFYCNSTQLFNSTWFNSTWSTEGSNNTEGSDTITLPCRIKQFINMWQEVGKAMYAPPISGQIRCSSNITGLLLTRDGGNNNNGSEIFRPGGGDMRDNWRSELYKYKVVKIEPLGVAPTKAKRRVVQREKRAVGIGALFLGFLGAAGSTMGARSMTLTVQARQLLSGIVQQQNNLLRAIEAQQHLLQLTVWGIKQLQARILAVERYFKDQQLLGIWGCSGKLICTTAVPWNASWSNKSLEQIWNNMTWMEWDREINNYTSLIHSLIEESQNQQEKNEQELLELDKWASLWNWFNITNWLWYIKIFIMIVGGLVGLRIVFAVLSIVNRVRQGYSPLSFQTHLPTPRGPDRPEGIEEEGGERDRDRSIRLVNGSLALIWDDLRSLCLFSYHRLRDLLLIVTRIVELLGRRGWEALKYWWNLLQYWSQELKNSAVSLLNATAIAVAEGTDRVIEVVQGACRAIRHIPRRIRQGLERILL

SEQ ID NO: 219 - protein, 861 aa, Human immunodeficiency virus type 1
MRVKEKYQHLWRWGWKWGTMLLGILMICSATEKLWVTVYYGVPVWKEATTTLFCASDAKAYDTEVHNVWATHACVPTDPNPQEVVLVNVTENFNMWKNDMVEQMHEDIISLWDQSLKPCVKLTPLCVSLKCTDLGNATNTNSSNTNSSSGEMMMEKGEIKNCSFNISTSIRGKVQKEYAFFYKLDIIPIDNDTTSYTLTSCNTSVITQACPKVSFEPIPIHYCAPAGFAILKCNNKTFNGTGPCTNVSTVQCTHGIRPVVSTQLLLNGSLAEEEVVIRSANFTDNAKTIIVQLNQSVEINCTRPNNNTRKSIRIQRGPGRAFVTIGKIGNMRQAHCNISRAKWNATLKQIASKLREQFGNNKTIIFKQSSGGDPEIVTHSFNCGGEFFYCNSTQLFNSTWFNSTWSTEGSNNTEGSDTITLPCRIKQFINMWQEVGKAMYAPPISGQIRCSSNITGLLLTRDGGNNNNGSEIFRPGGGDMRDNWRSELYKYKVVKIEPLGVAPTKAKRRVVQREKRAVGIGALFLGFLGAAGSTMGARSMTLTVQARQLLSGIVQQQNNLLRAIEAQQHLLQLTVWGIKQLQARILAVERYGKDQQLLGIWGCSGKLICTTAVPWNASWSNKSLEQIWNNMTWMEWDREINNYTSLIHSLIEESQNQQEKNEQELLELDKWASLWNWFNITNWLWYIKIFIMIVGGLVGLRIVFAVLSIVNRVRQGYSPLSFQTHLPTPRGPDRPEGIEEEGGERDRDRSIRLVNGSLALIWDDLRSLCLFSYHRLRDLLLIVTRIVELLGRRGWEALKYWWNLLQYWSQELKNSAVSLLNATAIAVAEGTDRVIEVVQGACRAIRHIPRRIRQGLERILL

SEQ ID NO: 220 - protein, 861 aa, Human immunodeficiency virus type 1
MRVKEKYQHLWRWGWKWGTMLLGILMICSATEKLWVTVYYGVPVWKEATTTLFCASDAKAYDTEVHNVWATHACVPTDPNPQEVVLVNVTENFNMWKNDMVEQMHEDIISLWDQSLKPCVKLTPLCVSLKCTDLGNATNTNSSNTNSSSGEMMMEKGEIKNCSFNISTSIRGKVQKEYAFFYKLDIIPIDNDTTSYTLTSCNTSVITQACPKVSFEPIPIHYCAPAGFAILKCNNKTFNGTGPCTNVSTVQCTHGIRPVVSTQLLLNGSLAEEEVVIRSANFTDNAKTIIVQLNQSVEINCTRPNNNTRKSIRIQRGPGRAFVTIGKIGNMRQAHCNISRAKWNATLKQIASKLREQFGNNKTIIFKQSSGGDPEIVTHSFNCGGEFFYCNSTQLFNSTWFNSTWSTEGSNNTEGSDTITLPCRIKQFINMWQEVGKAMYAPPISGQIRCSSNITGLLLTRDGGNNNNGSEIFRPGGGDMRDNWRSELYKYKVVKIEPLGVAPTKAKRRVVQREKRAVGIGALFLGFLGAAGSTMGARSMTLTVQARQLLSGIVQQQNNLLRAIEAQQHLLQLTVWGIKQLQARILAVERYRKDQQLLGIWGCSGKLICTTAVPWNASWSNKSLEQIWNNMTWMEWDREINNYTSLIHSLIEESQNQQEKNEQELLELDKWASLWNWFNITNWLWYIKIFIMIVGGLVGLRIVFAVLSIVNRVRQGYSPLSFQTHLPTPRGPDRPEGIEEEGGERDRDRSIRLVNGSLALIWDDLRSLCLFSYHRLRDLLLIVTRIVELLGRRGWEALKYWWNLLQYWSQELKNSAVSLLNATAIAVAEGTDRVIEVVQGACRAIRHIPRRIRQGLERILL

SEQ ID NO: 221 - protein, 861 aa, Human immunodeficiency virus type 1
MRVKEKYQHLWRWGWKWGTMLLGILMICSATEKLWVTVYYGVPVWKEATTTLFCASDAKAYDTEVHNVWATHACVPTDPNPQEVVLVNVTENFNMWKNDMVEQMHEDIISLWDQSLKPCVKLTPLCVSLKCTDLGNATNTNSSNTNSSSGEMMMEKGEIKNCSFNISTSIRGKVQKEYAFFYKLDIIPIDNDTTSYTLTSCNTSVITQACPKVSFEPIPIHYCAPAGFAILKCNNKTFNGTGPCTNVSTVQCTHGIRPVVSTQLLLNGSLAEEEVVIRSANFTDNAKTIIVQLNQSVEINCTRPNNNTRKSIRIQRGPGRAFVTIGKIGNMRQAHCNISRAKWNATLKQIASKLREQFGNNKTIIFKQSSGGDPEIVTHSFNCGGEFFYCNSTQLFNSTWFNSTWSTEGSNNTEGSDTITLPCRIKQFINMWQEVGKAMYAPPISGQIRCSSNITGLLLTRDGGNNNNGSEIFRPGGGDMRDNWRSELYKYKVVKIEPLGVAPTKAKRRVVQREKRAVGIGALFLGFLGAAGSTMGARSMTLTVQARQLLSGIVQQQNNLLRAIEAQQHLLQLTVWGIKQLQARILAVERAAKDQQLLGIWGCSGKLICTTAVPWNASWSNKSLEQIWNNMTWMEWDREINNYTSLIHSLIEESQNQQEKNEQELLELDKWASLWNWFNITNWLWYIKIFIMIVGGLVGLRIVFAVLSIVNRVRQGYSPLSFQTHLPTPRGPDRPEGIEEEGGERDRDRSIRLVNGSLALIWDDLRSLCLFSYHRLRDLLLIVTRIVELLGRRGWEALKYWWNLLQYWSQELKNSAVSLLNATAIAVAEGTDRVIEVVQGACRAIRHIPRRIRQGLERILL

SEQ ID NO: 222 - protein, 861 aa, Human immunodeficiency virus type 1
MRVKEKYQHLWRWGWKWGTMLLGILMICSATEKLWVTVYYGVPVWKEATTTLFCASDAKAYDTEVHNVWATHACVPTDPNPQEVVLVNVTENFNMWKNDMVEQMHEDIISLWDQSLKPCVKLTPLCVSLKCTDLGNATNTNSSNTNSSSGEMMMEKGEIKNCSFNISTSIRGKVQKEYAFFYKLDIIPIDNDTTSYTLTSCNTSVITQACPKVSFEPIPIHYCAPAGFAILKCNNKTFNGTGPCTNVSTVQCTHGIRPVVSTQLLLNGSLAEEEVVIRSANFTDNAKTIIVQLNQSVEINCTRPNNNTRKSIRIQRGPGRAFVTIGKIGNMRQAHCNISRAKWNATLKQIASKLREQFGNNKTIIFKQSSGGDPEIVTHSFNCGGEFFYCNSTQLFNSTWFNSTWSTEGSNNTEGSDTITLPCRIKQFINMWQEVGKAMYAPPISGQIRCSSNITGLLLTRDGGNNNNGSEIFRPGGGDMRDNWRSELYKYKVVKIEPLGVAPTKAKRRVVQREKRAVGIGALFLGFLGAAGSTMGARSMTLTVQARQLLSGIVQQQNNLLRAIEAQQHLLQLTVWGIKQLQARILAVERAFKDQQLLGIWGCSGKLICTTAVPWNASWSNKSLEQIWNNMTWMEWDREINNYTSLIHSLIEESQNQQEKNEQELLELDKWASLWNWFNITNWLWYIKIFIMIVGGLVGLRIVFAVLSIVNRVRQGYSPLSFQTHLPTPRGPDRPEGIEEEGGERDRDRSIRLVNGSLALIWDDLRSLCLFSYHRLRDLLLIVTRIVELLGRRGWEALKYWWNLLQYWSQELKNSAVSLLNATAIAVAEGTDRVIEVVQGACRAIRHIPRRIRQGLERILL

SEQ ID NO: 223 - protein, 861 aa, Human immunodeficiency virus type 1
MRVKEKYQHLWRWGWKWGTMLLGILMICSATEKLWVTVYYGVPVWKEATTTLFCASDAKAYDTEVHNVWATHACVPTDPNPQEVVLVNVTENFNMWKNDMVEQMHEDIISLWDQSLKPCVKLTPLCVSLKCTDLGNATNTNSSNTNSSSGEMMMEKGEIKNCSFNISTSIRGKVQKEYAFFYKLDIIPIDNDTTSYTLTSCNTSVITQACPKVSFEPIPIHYCAPAGFAILKCNNKTFNGTGPCTNVSTVQCTHGIRPVVSTQLLLNGSLAEEEVVIRSANFTDNAKTIIVQLNQSVEINCTRPNNNTRKSIRIQRGPGRAFVTIGKIGNMRQAHCNISRAKWNATLKQIASKLREQFGNNKTIIFKQSSGGDPEIVTHSFNCGGEFFYCNSTQLFNSTWFNSTWSTEGSNNTEGSDTITLPCRIKQFINMWQEVGKAMYAPPISGQIRCSSNITGLLLTRDGGNNNNGSEIFRPGGGDMRDNWRSELYKYKVVKIEPLGVAPTKAKRRVVQREKRAVGIGALFLGFLGAAGSTMGARSMTLTVQARQLLSGIVQQQNNLLRAIEAQQHLLQLTVWGIKQLQARILAVERAGKDQQLLGIWGCSGKLICTTAVPWNASWSNKSLEQIWNNMTWMEWDREINNYTSLIHSLIEESQNQQEKNEQELLELDKWASLWNWFNITNWLWYIKIFIMIVGGLVGLRIVFAVLSIVNRVRQGYSPLSFQTHLPTPRGPDRPEGIEEEGGERDRDRSIRLVNGSLALIWDDLRSLCLFSYHRLRDLLLIVTRIVELLGRRGWEALKYWWNLLQYWSQELKNSAVSLLNATAIAVAEGTDRVIEVVQGACRAIRHIPRRIRQGLERILL

SEQ ID NO: 224 - protein, 861 aa, Human immunodeficiency virus type 1
MRVKEKYQHLWRWGWKWGTMLLGILMICSATEKLWVTVYYGVPVWKEATTTLFCASDAKAYDTEVHNVWATHACVPTDPNPQEVVLVNVTENFNMWKNDMVEQMHEDIISLWDQSLKPCVKLTPLCVSLKCTDLGNATNTNSSNTNSSSGEMMMEKGEIKNCSFNISTSIRGKVQKEYAFFYKLDIIPIDNDTTSYTLTSCNTSVITQACPKVSFEPIPIHYCAPAGFAILKCNNKTFNGTGPCTNVSTVQCTHGIRPVVSTQLLLNGSLAEEEVVIRSANFTDNAKTIIVQLNQSVEINCTRPNNNTRKSIRIQRGPGRAFVTIGKIGNMRQAHCNISRAKWNATLKQIASKLREQFGNNKTIIFKQSSGGDPEIVTHSFNCGGEFFYCNSTQLFNSTWFNSTWSTEGSNNTEGSDTITLPCRIKQFINMWQEVGKAMYAPPISGQIRCSSNITGLLLTRDGGNNNNGSEIFRPGGGDMRDNWRSELYKYKVVKIEPLGVAPTKAKRRVVQREKRAVGIGALFLGFLGAAGSTMGARSMTLTVQARQLLSGIVQQQNNLLRAIEAQQHLLQLTVWGIKQLQARILAVERARKDQQLLGIWGCSGKLICTTAVPWNASWSNKSLEQIWNNMTWMEWDREINNYTSLIHSLIEESQNQQEKNEQELLELDKWASLWNWFNITNWLWYIKIFIMIVGGLVGLRIVFAVLSIVNRVRQGYSPLSFQTHLPTPRGPDRPEGIEEEGGERDRDRSIRLVNGSLALIWDDLRSLCLFSYHRLRDLLLIVTRIVELLGRRGWEALKYWWNLLQYWSQELKNSAVSLLNATAIAVAEGTDRVIEVVQGACRAIRHIPRRIRQGLERILL

SEQ ID NO: 225 - protein, 861 aa, Human immunodeficiency virus type 1
MRVKEKYQHLWRWGWKWGTMLLGILMICSATEKLWVTVYYGVPVWKEATTTLFCASDAKAYDTEVHNVWATHACVPTDPNPQEVVLVNVTENFNMWKNDMVEQMHEDIISLWDQSLKPCVKLTPLCVSLKCTDLGNATNTNSSNTNSSSGEMMMEKGEIKNCSFNISTSIRGKVQKEYAFFYKLDIIPIDNDTTSYTLTSCNTSVITQACPKVSFEPIPIHYCAPAGFAILKCNNKTFNGTGPCTNVSTVQCTHGIRPVVSTQLLLNGSLAEEEVVIRSANFTDNAKTIIVQLNQSVEINCTRPNNNTRKSIRIQRGPGRAFVTIGKIGNMRQAHCNISRAKWNATLKQIASKLREQFGNNKTIIFKQSSGGDPEIVTHSFNCGGEFFYCNSTQLFNSTWFNSTWSTEGSNNTEGSDTITLPCRIKQFINMWQEVGKAMYAPPISGQIRCSSNITGLLLTRDGGNNNNGSEIFRPGGGDMRDNWRSELYKYKVVKIEPLGVAPTKAKRRVVQREKRAVGIGALFLGFLGAAGSTMGARSMTLTVQARQLLSGIVQQQNNLLRAIEAQQHLLQLTVWGIKQLQARILAVERFAKDQQLLGIWGCSGKLICTTAVPWNASWSNKSLEQIWNNMTWMEWDREINNYTSLIHSLIEESQNQQEKNEQELLELDKWASLWNWFNITNWLWYIKIFIMIVGGLVGLRIVFAVLSIVNRVRQGYSPLSFQTHLPTPRGPDRPEGIEEEGGERDRDRSIRLVNGSLALIWDDLRSLCLFSYHRLRDLLLIVTRIVELLGRRGWEALKYWWNLLQYWSQELKNSAVSLLNATAIAVAEGTDRVIEVVQGACRAIRHIPRRIRQGLERILL

SEQ ID NO: 226 - protein, 861 aa, Human immunodeficiency virus type 1
MRVKEKYQHLWRWGWKWGTMLLGILMICSATEKLWVTVYYGVPVWKEATTTLFCASDAKAYDTEVHNVWATHACVPTDPNPQEVVLVNVTENFNMWKNDMVEQMHEDIISLWDQSLKPCVKLTPLCVSLKCTDLGNATNTNSSNTNSSSGEMMMEKGEIKNCSFNISTSIRGKVQKEYAFFYKLDIIPIDNDTTSYTLTSCNTSVITQACPKVSFEPIPIHYCAPAGFAILKCNNKTFNGTGPCTNVSTVQCTHGIRPVVSTQLLLNGSLAEEEVVIRSANFTDNAKTIIVQLNQSVEINCTRPNNNTRKSIRIQRGPGRAFVTIGKIGNMRQAHCNISRAKWNATLKQIASKLREQFGNNKTIIFKQSSGGDPEIVTHSFNCGGEFFYCNSTQLFNSTWFNSTWSTEGSNNTEGSDTITLPCRIKQFINMWQEVGKAMYAPPISGQIRCSSNITGLLLTRDGGNNNNGSEIFRPGGGDMRDNWRSELYKYKVVKIEPLGVAPTKAKRRVVQREKRAVGIGALFLGFLGAAGSTMGARSMTLTVQARQLLSGIVQQQNNLLRAIEAQQHLLQLTVWGIKQLQARILAVERFFKDQQLLGIWGCSGKLICTTAVPWNASWSNKSLEQIWNNMTWMEWDREINNYTSLIHSLIEESQNQQEKNEQELLELDKWASLWNWFNITNWLWYIKIFIMIVGGLVGLRIVFAVLSIVNRVRQGYSPLSFQTHLPTPRGPDRPEGIEEEGGERDRDRSIRLVNGSLALIWDDLRSLCLFSYHRLRDLLLIVTRIVELLGRRGWEALKYWWNLLQYWSQELKNSAVSLLNATAIAVAEGTDRVIEVVQGACRAIRHIPRRIRQGLERILL

SEQ ID NO: 227 - protein, 861 aa, Human immunodeficiency virus type 1
MRVKEKYQHLWRWGWKWGTMLLGILMICSATEKLWVTVYYGVPVWKEATTTLFCASDAKAYDTEVHNVWATHACVPTDPNPQEVVLVNVTENFNMWKNDMVEQMHEDIISLWDQSLKPCVKLTPLCVSLKCTDLGNATNTNSSNTNSSSGEMMMEKGEIKNCSFNISTSIRGKVQKEYAFFYKLDIIPIDNDTTSYTLTSCNTSVITQACPKVSFEPIPIHYCAPAGFAILKCNNKTFNGTGPCTNVSTVQCTHGIRPVVSTQLLLNGSLAEEEVVIRSANFTDNAKTIIVQLNQSVEINCTRPNNNTRKSIRIQRGPGRAFVTIGKIGNMRQAHCNISRAKWNATLKQIASKLREQFGNNKTIIFKQSSGGDPEIVTHSFNCGGEFFYCNSTQLFNSTWFNSTWSTEGSNNTEGSDTITLPCRIKQFINMWQEVGKAMYAPPISGQIRCSSNITGLLLTRDGGNNNNGSEIFRPGGGDMRDNWRSELYKYKVVKIEPLGVAPTKAKRRVVQREKRAVGIGALFLGFLGAAGSTMGARSMTLTVQARQLLSGIVQQQNNLLRAIEAQQHLLQLTVWGIKQLQARILAVERFGKDQQLLGIWGCSGKLICTTAVPWNASWSNKSLEQIWNNMTWMEWDREINNYTSLIHSLIEESQNQQEKNEQELLELDKWASLWNWFNITNWLWYIKIFIMIVGGLVGLRIVFAVLSIVNRVRQGYSPLSFQTHLPTPRGPDRPEGIEEEGGERDRDRSIRLVNGSLALIWDDLRSLCLFSYHRLRDLLLIVTRIVELLGRRGWEALKYWWNLLQYWSQELKNSAVSLLNATAIAVAEGTDRVIEVVQGACRAIRHIPRRIRQGLERILL

SEQ ID NO: 228 - protein, 861 aa, Human immunodeficiency virus type 1
MRVKEKYQHLWRWGWKWGTMLLGILMICSATEKLWVTVYYGVPVWKEATTTLFCASDAKAYDTEVHNVWATHACVPTDPNPQEVVLVNVTENFNMWKNDMVEQMHEDIISLWDQSLKPCVKLTPLCVSLKCTDLGNATNTNSSNTNSSSGEMMMEKGEIKNCSFNISTSIRGKVQKEYAFFYKLDIIPIDNDTTSYTLTSCNTSVITQACPKVSFEPIPIHYCAPAGFAILKCNNKTFNGTGPCTNVSTVQCTHGIRPVVSTQLLLNGSLAEEEVVIRSANFTDNAKTIIVQLNQSVEINCTRPNNNTRKSIRIQRGPGRAFVTIGKIGNMRQAHCNISRAKWNATLKQIASKLREQFGNNKTIIFKQSSGGDPEIVTHSFNCGGEFFYCNSTQLFNSTWFNSTWSTEGSNNTEGSDTITLPCRIKQFINMWQEVGKAMYAPPISGQIRCSSNITGLLLTRDGGNNNNGSEIFRPGGGDMRDNWRSELYKYKVVKIEPLGVAPTKAKRRVVQREKRAVGIGALFLGFLGAAGSTMGARSMTLTVQARQLLSGIVQQQNNLLRAIEAQQHLLQLTVWGIKQLQARILAVERFRKDQQLLGIWGCSGKLICTTAVPWNASWSNKSLEQIWNNMTWMEWDREINNYTSLIHSLIEESQNQQEKNEQELLELDKWASLWNWFNITNWLWYIKIFIMIVGGLVGLRIVFAVLSIVNRVRQGYSPLSFQTHLPTPRGPDRPEGIEEEGGERDRDRSIRLVNGSLALIWDDLRSLCLFSYHRLRDLLLIVTRIVELLGRRGWEALKYWWNLLQYWSQELKNSAVSLLNATAIAVAEGTDRVIEVVQGACRAIRHIPRRIRQGLERILL

SEQ ID NO: 229 - protein, 861 aa, Human immunodeficiency virus type 1
MRVKEKYQHLWRWGWKWGTMLLGILMICSATEKLWVTVYYGVPVWKEATTTLFCASDAKAYDTEVHNVWATHACVPTDPNPQEVVLVNVTENFNMWKNDMVEQMHEDIISLWDQSLKPCVKLTPLCVSLKCTDLGNATNTNSSNTNSSSGEMMMEKGEIKNCSFNISTSIRGKVQKEYAFFYKLDIIPIDNDTTSYTLTSCNTSVITQACPKVSFEPIPIHYCAPAGFAILKCNNKTFNGTGPCTNVSTVQCTHGIRPVVSTQLLLNGSLAEEEVVIRSANFTDNAKTIIVQLNQSVEINCTRPNNNTRKSIRIQRGPGRAFVTIGKIGNMRQAHCNISRAKWNATLKQIASKLREQFGNNKTIIFKQSSGGDPEIVTHSFNCGGEFFYCNSTQLFNSTWFNSTWSTEGSNNTEGSDTITLPCRIKQFINMWQEVGKAMYAPPISGQIRCSSNITGLLLTRDGGNNNNGSEIFRPGGGDMRDNWRSELYKYKVVKIEPLGVAPTKAKRRVVQREKRAVGIGALFLGFLGAAGSTMGARSMTLTVQARQLLSGIVQQQNNLLRAIEAQQHLLQLTVWGIKQLQARILAVERGAKDQQLLGIWGCSGKLICTTAVPWNASWSNKSLEQIWNNMTWMEWDREINNYTSLIHSLIEESQNQQEKNEQELLELDKWASLWNWFNITNWLWYIKIFIMIVGGLVGLRIVFAVLSIVNRVRQGYSPLSFQTHLPTPRGPDRPEGIEEEGGERDRDRSIRLVNGSLALIWDDLRSLCLFSYHRLRDLLLIVTRIVELLGRRGWEALKYWWNLLQYWSQELKNSAVSLLNATAIAVAEGTDRVIEVVQGACRAIRHIPRRIRQGLERILL

SEQ ID NO: 230 - protein, 861 aa, Human immunodeficiency virus type 1
MRVKEKYQHLWRWGWKWGTMLLGILMICSATEKLWVTVYYGVPVWKEATTTLFCASDAKAYDTEVHNVWATHACVPTDPNPQEVVLVNVTENFNMWKNDMVEQMHEDIISLWDQSLKPCVKLTPLCVSLKCTDLGNATNTNSSNTNSSSGEMMMEKGEIKNCSFNISTSIRGKVQKEYAFFYKLDIIPIDNDTTSYTLTSCNTSVITQACPKVSFEPIPIHYCAPAGFAILKCNNKTFNGTGPCTNVSTVQCTHGIRPVVSTQLLLNGSLAEEEVVIRSANFTDNAKTIIVQLNQSVEINCTRPNNNTRKSIRIQRGPGRAFVTIGKIGNMRQAHCNISRAKWNATLKQIASKLREQFGNNKTIIFKQSSGGDPEIVTHSFNCGGEFFYCNSTQLFNSTWFNSTWSTEGSNNTEGSDTITLPCRIKQFINMWQEVGKAMYAPPISGQIRCSSNITGLLLTRDGGNNNNGSEIFRPGGGDMRDNWRSELYKYKVVKIEPLGVAPTKAKRRVVQREKRAVGIGALFLGFLGAAGSTMGARSMTLTVQARQLLSGIVQQQNNLLRAIEAQQHLLQLTVWGIKQLQARILAVERGFKDQQLLGIWGCSGKLICTTAVPWNASWSNKSLEQIWNNMTWMEWDREINNYTSLIHSLIEESQNQQEKNEQELLELDKWASLWNWFNITNWLWYIKIFIMIVGGLVGLRIVFAVLSIVNRVRQGYSPLSFQTHLPTPRGPDRPEGIEEEGGERDRDRSIRLVNGSLALIWDDLRSLCLFSYHRLRDLLLIVTRIVELLGRRGWEALKYWWNLLQYWSQELKNSAVSLLNATAIAVAEGTDRVIEVVQGACRAIRHIPRRIRQGLERILL

SEQ ID NO: 231 - protein, 861 aa, Human immunodeficiency virus type 1
MRVKEKYQHLWRWGWKWGTMLLGILMICSATEKLWVTVYYGVPVWKEATTTLFCASDAKAYDTEVHNVWATHACVPTDPNPQEVVLVNVTENFNMWKNDMVEQMHEDIISLWDQSLKPCVKLTPLCVSLKCTDLGNATNTNSSNTNSSSGEMMMEKGEIKNCSFNISTSIRGKVQKEYAFFYKLDIIPIDNDTTSYTLTSCNTSVITQACPKVSFEPIPIHYCAPAGFAILKCNNKTFNGTGPCTNVSTVQCTHGIRPVVSTQLLLNGSLAEEEVVIRSANFTDNAKTIIVQLNQSVEINCTRPNNNTRKSIRIQRGPGRAFVTIGKIGNMRQAHCNISRAKWNATLKQIASKLREQFGNNKTIIFKQSSGGDPEIVTHSFNCGGEFFYCNSTQLFNSTWFNSTWSTEGSNNTEGSDTITLPCRIKQFINMWQEVGKAMYAPPISGQIRCSSNITGLLLTRDGGNNNNGSEIFRPGGGDMRDNWRSELYKYKVVKIEPLGVAPTKAKRRVVQREKRAVGIGALFLGFLGAAGSTMGARSMTLTVQARQLLSGIVQQQNNLLRAIEAQQHLLQLTVWGIKQLQARILAVERGGKDQQLLGIWGCSGKLICTTAVPWNASWSNKSLEQIWNNMTWMEWDREINNYTSLIHSLIEESQNQQEKNEQELLELDKWASLWNWFNITNWLWYIKIFIMIVGGLVGLRIVFAVLSIVNRVRQGYSPLSFQTHLPTPRGPDRPEGIEEEGGERDRDRSIRLVNGSLALIWDDLRSLCLFSYHRLRDLLLIVTRIVELLGRRGWEALKYWWNLLQYWSQELKNSAVSLLNATAIAVAEGTDRVIEVVQGACRAIRHIPRRIRQGLERILL

SEQ ID NO: 232 - protein, 861 aa, Human immunodeficiency virus type 1
MRVKEKYQHLWRWGWKWGTMLLGILMICSATEKLWVTVYYGVPVWKEATTTLFCASDAKAYDTEVHNVWATHACVPTDPNPQEVVLVNVTENFNMWKNDMVEQMHEDIISLWDQSLKPCVKLTPLCVSLKCTDLGNATNTNSSNTNSSSGEMMMEKGEIKNCSFNISTSIRGKVQKEYAFFYKLDIIPIDNDTTSYTLTSCNTSVITQACPKVSFEPIPIHYCAPAGFAILKCNNKTFNGTGPCTNVSTVQCTHGIRPVVSTQLLLNGSLAEEEVVIRSANFTDNAKTIIVQLNQSVEINCTRPNNNTRKSIRIQRGPGRAFVTIGKIGNMRQAHCNISRAKWNATLKQIASKLREQFGNNKTIIFKQSSGGDPEIVTHSFNCGGEFFYCNSTQLFNSTWFNSTWSTEGSNNTEGSDTITLPCRIKQFINMWQEVGKAMYAPPISGQIRCSSNITGLLLTRDGGNNNNGSEIFRPGGGDMRDNWRSELYKYKVVKIEPLGVAPTKAKRRVVQREKRAVGIGALFLGFLGAAGSTMGARSMTLTVQARQLLSGIVQQQNNLLRAIEAQQHLLQLTVWGIKQLQARILAVERGRKDQQLLGIWGCSGKLICTTAVPWNASWSNKSLEQIWNNMTWMEWDREINNYTSLIHSLIEESQNQQEKNEQELLELDKWASLWNWFNITNWLWYIKIFIMIVGGLVGLRIVFAVLSIVNRVRQGYSPLSFQTHLPTPRGPDRPEGIEEEGGERDRDRSIRLVNGSLALIWDDLRSLCLFSYHRLRDLLLIVTRIVELLGRRGWEALKYWWNLLQYWSQELKNSAVSLLNATAIAVAEGTDRVIEVVQGACRAIRHIPRRIRQGLERILL

SEQ ID NO: 233 - protein, 861 aa, Human immunodeficiency virus type 1
MRVKEKYQHLWRWGWKWGTMLLGILMICSATEKLWVTVYYGVPVWKEATTTLFCASDAKAYDTEVHNVWATHACVPTDPNPQEVVLVNVTENFNMWKNDMVEQMHEDIISLWDQSLKPCVKLTPLCVSLKCTDLGNATNTNSSNTNSSSGEMMMEKGEIKNCSFNISTSIRGKVQKEYAFFYKLDIIPIDNDTTSYTLTSCNTSVITQACPKVSFEPIPIHYCAPAGFAILKCNNKTFNGTGPCTNVSTVQCTHGIRPVVSTQLLLNGSLAEEEVVIRSANFTDNAKTIIVQLNQSVEINCTRPNNNTRKSIRIQRGPGRAFVTIGKIGNMRQAHCNISRAKWNATLKQIASKLREQFGNNKTIIFKQSSGGDPEIVTHSFNCGGEFFYCNSTQLFNSTWFNSTWSTEGSNNTEGSDTITLPCRIKQFINMWQEVGKAMYAPPISGQIRCSSNITGLLLTRDGGNNNNGSEIFRPGGGDMRDNWRSELYKYKVVKIEPLGVAPTKAKRRVVQREKRAVGIGALFLGFLGAAGSTMGARSMTLTVQARQLLSGIVQQQNNLLRAIEAQQHLLQLTVWGIKQLQARILAVERLAKDQQLLGIWGCSGKLICTTAVPWNASWSNKSLEQIWNNMTWMEWDREINNYTSLIHSLIEESQNQQEKNEQELLELDKWASLWNWFNITNWLWYIKIFIMIVGGLVGLRIVFAVLSIVNRVRQGYSPLSFQTHLPTPRGPDRPEGIEEEGGERDRDRSIRLVNGSLALIWDDLRSLCLFSYHRLRDLLLIVTRIVELLGRRGWEALKYWWNLLQYWSQELKNSAVSLLNATAIAVAEGTDRVIEVVQGACRAIRHIPRRIRQGLERILL

SEQ ID NO: 234 - protein, 861 aa, Human immunodeficiency virus type 1
MRVKEKYQHLWRWGWKWGTMLLGILMICSATEKLWVTVYYGVPVWKEATTTLFCASDAKAYDTEVHNVWATHACVPTDPNPQEVVLVNVTENFNMWKNDMVEQMHEDIISLWDQSLKPCVKLTPLCVSLKCTDLGNATNTNSSNTNSSSGEMMMEKGEIKNCSFNISTSIRGKVQKEYAFFYKLDIIPIDNDTTSYTLTSCNTSVITQACPKVSFEPIPIHYCAPAGFAILKCNNKTFNGTGPCTNVSTVQCTHGIRPVVSTQLLLNGSLAEEEVVIRSANFTDNAKTIIVQLNQSVEINCTRPNNNTRKSIRIQRGPGRAFVTIGKIGNMRQAHCNISRAKWNATLKQIASKLREQFGNNKTIIFKQSSGGDPEIVTHSFNCGGEFFYCNSTQLFNSTWFNSTWSTEGSNNTEGSDTITLPCRIKQFINMWQEVGKAMYAPPISGQIRCSSNITGLLLTRDGGNNNNGSEIFRPGGGDMRDNWRSELYKYKVVKIEPLGVAPTKAKRRVVQREKRAVGIGALFLGFLGAAGSTMGARSMTLTVQARQLLSGIVQQQNNLLRAIEAQQHLLQLTVWGIKQLQARILAVERLFKDQQLLGIWGCSGKLICTTAVPWNASWSNKSLEQIWNNMTWMEWDREINNYTSLIHSLIEESQNQQEKNEQELLELDKWASLWNWFNITNWLWYIKIFIMIVGGLVGLRIVFAVLSIVNRVRQGYSPLSFQTHLPTPRGPDRPEGIEEEGGERDRDRSIRLVNGSLALIWDDLRSLCLFSYHRLRDLLLIVTRIVELLGRRGWEALKYWWNLLQYWSQELKNSAVSLLNATAIAVAEGTDRVIEVVQGACRAIRHIPRRIRQGLERILL

SEQ ID NO: 235 - protein, 861 aa, Human immunodeficiency virus type 1
MRVKEKYQHLWRWGWKWGTMLLGILMICSATEKLWVTVYYGVPVWKEATTTLFCASDAKAYDTEVHNVWATHACVPTDPNPQEVVLVNVTENFNMWKNDMVEQMHEDIISLWDQSLKPCVKLTPLCVSLKCTDLGNATNTNSSNTNSSSGEMMMEKGEIKNCSFNISTSIRGKVQKEYAFFYKLDIIPIDNDTTSYTLTSCNTSVITQACPKVSFEPIPIHYCAPAGFAILKCNNKTFNGTGPCTNVSTVQCTHGIRPVVSTQLLLNGSLAEEEVVIRSANFTDNAKTIIVQLNQSVEINCTRPNNNTRKSIRIQRGPGRAFVTIGKIGNMRQAHCNISRAKWNATLKQIASKLREQFGNNKTIIFKQSSGGDPEIVTHSFNCGGEFFYCNSTQLFNSTWFNSTWSTEGSNNTEGSDTITLPCRIKQFINMWQEVGKAMYAPPISGQIRCSSNITGLLLTRDGGNNNNGSEIFRPGGGDMRDNWRSELYKYKVVKIEPLGVAPTKAKRRVVQREKRAVGIGALFLGFLGAAGSTMGARSMTLTVQARQLLSGIVQQQNNLLRAIEAQQHLLQLTVWGIKQLQARILAVERLGKDQQLLGIWGCSGKLICTTAVPWNASWSNKSLEQIWNNMTWMEWDREINNYTSLIHSLIEESQNQQEKNEQELLELDKWASLWNWFNITNWLWYIKIFIMIVGGLVGLRIVFAVLSIVNRVRQGYSPLSFQTHLPTPRGPDRPEGIEEEGGERDRDRSIRLVNGSLALIWDDLRSLCLFSYHRLRDLLLIVTRIVELLGRRGWEALKYWWNLLQYWSQELKNSAVSLLNATAIAVAEGTDRVIEVVQGACRAIRHIPRRIRQGLERILL

SEQ ID NO: 236 - protein, 861 aa, Human immunodeficiency virus type 1
MRVKEKYQHLWRWGWKWGTMLLGILMICSATEKLWVTVYYGVPVWKEATTTLFCASDAKAYDTEVHNVWATHACVPTDPNPQEVVLVNVTENFNMWKNDMVEQMHEDIISLWDQSLKPCVKLTPLCVSLKCTDLGNATNTNSSNTNSSSGEMMMEKGEIKNCSFNISTSIRGKVQKEYAFFYKLDIIPIDNDTTSYTLTSCNTSVITQACPKVSFEPIPIHYCAPAGFAILKCNNKTFNGTGPCTNVSTVQCTHGIRPVVSTQLLLNGSLAEEEVVIRSANFTDNAKTIIVQLNQSVEINCTRPNNNTRKSIRIQRGPGRAFVTIGKIGNMRQAHCNISRAKWNATLKQIASKLREQFGNNKTIIFKQSSGGDPEIVTHSFNCGGEFFYCNSTQLFNSTWFNSTWSTEGSNNTEGSDTITLPCRIKQFINMWQEVGKAMYAPPISGQIRCSSNITGLLLTRDGGNNNNGSEIFRPGGGDMRDNWRSELYKYKVVKIEPLGVAPTKAKRRVVQREKRAVGIGALFLGFLGAAGSTMGARSMTLTVQARQLLSGIVQQQNNLLRAIEAQQHLLQLTVWGIKQLQARILAVERLRKDQQLLGIWGCSGKLICTTAVPWNASWSNKSLEQIWNNMTWMEWDREINNYTSLIHSLIEESQNQQEKNEQELLELDKWASLWNWFNITNWLWYIKIFIMIVGGLVGLRIVFAVLSIVNRVRQGYSPLSFQTHLPTPRGPDRPEGIEEEGGERDRDRSIRLVNGSLALIWDDLRSLCLFSYHRLRDLLLIVTRIVELLGRRGWEALKYWWNLLQYWSQELKNSAVSLLNATAIAVAEGTDRVIEVVQGACRAIRHIPRRIRQGLERILL

SEQ ID NO: 237 - protein, 861 aa, Human immunodeficiency virus type 1
MRVKEKYQHLWRWGWKWGTMLLGILMICSATEKLWVTVYYGVPVWKEATTTLFCASDAKAYDTEVHNVWATHACVPTDPNPQEVVLVNVTENFNMWKNDMVEQMHEDIISLWDQSLKPCVKLTPLCVSLKCTDLGNATNTNSSNTNSSSGEMMMEKGEIKNCSFNISTSIRGKVQKEYAFFYKLDIIPIDNDTTSYTLTSCNTSVITQACPKVSFEPIPIHYCAPAGFAILKCNNKTFNGTGPCTNVSTVQCTHGIRPVVSTQLLLNGSLAEEEVVIRSANFTDNAKTIIVQLNQSVEINCTRPNNNTRKSIRIQRGPGRAFVTIGKIGNMRQAHCNISRAKWNATLKQIASKLREQFGNNKTIIFKQSSGGDPEIVTHSFNCGGEFFYCNSTQLFNSTWFNSTWSTEGSNNTEGSDTITLPCRIKQFINMWQEVGKAMYAPPISGQIRCSSNITGLLLTRDGGNNNNGSEIFRPGGGDMRDNWRSELYKYKVVKIEPLGVAPTKAKRRVVQREKRAVGIGALFLGFLGAAGSTMGARSMTLTVQARQLLSGIVQQQNNLLRAIEAQQHLLQLTVWGIKQLQARILAVERRAKDQQLLGIWGCSGKLICTTAVPWNASWSNKSLEQIWNNMTWMEWDREINNYTSLIHSLIEESQNQQEKNEQELLELDKWASLWNWFNITNWLWYIKIFIMIVGGLVGLRIVFAVLSIVNRVRQGYSPLSFQTHLPTPRGPDRPEGIEEEGGERDRDRSIRLVNGSLALIWDDLRSLCLFSYHRLRDLLLIVTRIVELLGRRGWEALKYWWNLLQYWSQELKNSAVSLLNATAIAVAEGTDRVIEVVQGACRAIRHIPRRIRQGLERILL

SEQ ID NO: 238 - protein, 861 aa, Human immunodeficiency virus type 1
MRVKEKYQHLWRWGWKWGTMLLGILMICSATEKLWVTVYYGVPVWKEATTTLFCASDAKAYDTEVHNVWATHACVPTDPNPQEVVLVNVTENFNMWKNDMVEQMHEDIISLWDQSLKPCVKLTPLCVSLKCTDLGNATNTNSSNTNSSSGEMMMEKGEIKNCSFNISTSIRGKVQKEYAFFYKLDIIPIDNDTTSYTLTSCNTSVITQACPKVSFEPIPIHYCAPAGFAILKCNNKTFNGTGPCTNVSTVQCTHGIRPVVSTQLLLNGSLAEEEVVIRSANFTDNAKTIIVQLNQSVEINCTRPNNNTRKSIRIQRGPGRAFVTIGKIGNMRQAHCNISRAKWNATLKQIASKLREQFGNNKTIIFKQSSGGDPEIVTHSFNCGGEFFYCNSTQLFNSTWFNSTWSTEGSNNTEGSDTITLPCRIKQFINMWQEVGKAMYAPPISGQIRCSSNITGLLLTRDGGNNNNGSEIFRPGGGDMRDNWRSELYKYKVVKIEPLGVAPTKAKRRVVQREKRAVGIGALFLGFLGAAGSTMGARSMTLTVQARQLLSGIVQQQNNLLRAIEAQQHLLQLTVWGIKQLQARILAVERRFKDQQLLGIWGCSGKLICTTAVPWNASWSNKSLEQIWNNMTWMEWDREINNYTSLIHSLIEESQNQQEKNEQELLELDKWASLWNWFNITNWLWYIKIFIMIVGGLVGLRIVFAVLSIVNRVRQGYSPLSFQTHLPTPRGPDRPEGIEEEGGERDRDRSIRLVNGSLALIWDDLRSLCLFSYHRLRDLLLIVTRIVELLGRRGWEALKYWWNLLQYWSQELKNSAVSLLNATAIAVAEGTDRVIEVVQGACRAIRHIPRRIRQGLERILL

SEQ ID NO: 239 - protein, 861 aa, Human immunodeficiency virus type 1
MRVKEKYQHLWRWGWKWGTMLLGILMICSATEKLWVTVYYGVPVWKEATTTLFCASDAKAYDTEVHNVWATHACVPTDPNPQEVVLVNVTENFNMWKNDMVEQMHEDIISLWDQSLKPCVKLTPLCVSLKCTDLGNATNTNSSNTNSSSGEMMMEKGEIKNCSFNISTSIRGKVQKEYAFFYKLDIIPIDNDTTSYTLTSCNTSVITQACPKVSFEPIPIHYCAPAGFAILKCNNKTFNGTGPCTNVSTVQCTHGIRPVVSTQLLLNGSLAEEEVVIRSANFTDNAKTIIVQLNQSVEINCTRPNNNTRKSIRIQRGPGRAFVTIGKIGNMRQAHCNISRAKWNATLKQIASKLREQFGNNKTIIFKQSSGGDPEIVTHSFNCGGEFFYCNSTQLFNSTWFNSTWSTEGSNNTEGSDTITLPCRIKQFINMWQEVGKAMYAPPISGQIRCSSNITGLLLTRDGGNNNNGSEIFRPGGGDMRDNWRSELYKYKVVKIEPLGVAPTKAKRRVVQREKRAVGIGALFLGFLGAAGSTMGARSMTLTVQARQLLSGIVQQQNNLLRAIEAQQHLLQLTVWGIKQLQARILAVERRGKDQQLLGIWGCSGKLICTTAVPWNASWSNKSLEQIWNNMTWMEWDREINNYTSLIHSLIEESQNQQEKNEQELLELDKWASLWNWFNITNWLWYIKIFIMIVGGLVGLRIVFAVLSIVNRVRQGYSPLSFQTHLPTPRGPDRPEGIEEEGGERDRDRSIRLVNGSLALIWDDLRSLCLFSYHRLRDLLLIVTRIVELLGRRGWEALKYWWNLLQYWSQELKNSAVSLLNATAIAVAEGTDRVIEVVQGACRAIRHIPRRIRQGLERILL

SEQ ID NO: 240 - protein, 861 aa, Human immunodeficiency virus type 1
MRVKEKYQHLWRWGWKWGTMLLGILMICSATEKLWVTVYYGVPVWKEATTTLFCASDAKAYDTEVHNVWATHACVPTDPNPQEVVLVNVTENFNMWKNDMVEQMHEDIISLWDQSLKPCVKLTPLCVSLKCTDLGNATNTNSSNTNSSSGEMMMEKGEIKNCSFNISTSIRGKVQKEYAFFYKLDIIPIDNDTTSYTLTSCNTSVITQACPKVSFEPIPIHYCAPAGFAILKCNNKTFNGTGPCTNVSTVQCTHGIRPVVSTQLLLNGSLAEEEVVIRSANFTDNAKTIIVQLNQSVEINCTRPNNNTRKSIRIQRGPGRAFVTIGKIGNMRQAHCNISRAKWNATLKQIASKLREQFGNNKTIIFKQSSGGDPEIVTHSFNCGGEFFYCNSTQLFNSTWFNSTWSTEGSNNTEGSDTITLPCRIKQFINMWQEVGKAMYAPPISGQIRCSSNITGLLLTRDGGNNNNGSEIFRPGGGDMRDNWRSELYKYKVVKIEPLGVAPTKAKRRVVQREKRAVGIGALFLGFLGAAGSTMGARSMTLTVQARQLLSGIVQQQNNLLRAIEAQQHLLQLTVWGIKQLQARILAVERRRKDQQLLGIWGCSGKLICTTAVPWNASWSNKSLEQIWNNMTWMEWDREINNYTSLIHSLIEESQNQQEKNEQELLELDKWASLWNWFNITNWLWYIKIFIMIVGGLVGLRIVFAVLSIVNRVRQGYSPLSFQTHLPTPRGPDRPEGIEEEGGERDRDRSIRLVNGSLALIWDDLRSLCLFSYHRLRDLLLIVTRIVELLGRRGWEALKYWWNLLQYWSQELKNSAVSLLNATAIAVAEGTDRVIEVVQGACRAIRHIPRRIRQGLERILL

SEQ ID NO: 241 - protein, 856 aa, Human immunodeficiency virus type 1
MRVKEKYQHLWRWGWRWGTMLLGMLMICSATEKLWVTVYYGVPVWKEATTTLFCASDAKAYDTEVHNVWATHACVPTDPNPQEVVLVNVTENFNMWKNDMVEQMHEDIISLWDQSLKPCVKLTPLCVSLKCTDLKNDTNTNSSSGRMIMEKGEIKNCSFNISTSIRGKVQKEYAFFYKLDIIPIDNDTTSYTLTSCNTSVITQACPKVSFEPIPIHYCAPAGFAILKCNNKTFNGTGPCTNVSTVQCTHGIRPVVSTQLLLNGSLAEEEVVIRSANFTDNAKTIIVQLNQSVEINCTRPNNNTRKSIRIQRGPGRAFVTIGKIGNMRQAHCNISRAKWNNTLKQIDSKLREQFGNNKTIIFKQSSGGDPEIVTHSFNCGGEFFYCNSTQLFNSTWFNSTWSTKGSNNTEGSDTITLPCRIKQIINMWQEVGKAMYAPPISGQIRCSSNITGLLLTRDGGNSNNESEIFRPGGGDMRDNWRSELYKYKVVKIEPLGVAPTKAKRRVVQREKRAVGIGALFLGFLGAAGSTMGAASMTLTVQARQLLSGIVQQQNNLLRAIEAQQHLLQLTVWGIKQLQARILAVERALKDQQLLGIWGCSGKLICTTAVPWNASWSNKSLEQIWNNMTWMEWDREINNYTSLIHSLIEESQNQQEKNEQELLELDKWASLWNWFNITNWLWYIKLFIMIVGGLVGLRIVFAVLSVVNRVRQGYSPLSFQTHLPIPRGPDRPEGIEEEGGERDRDRSIRLVNGSLALIWDDLRSLCLFSYHRLRDLLLIVTRIVELLGRRGWEALKYWWNLLQYWSQELKNSAVSLLNATAIAVAEGTDRVIEVVQGAYRAIRHIPRRIRQGLERILL

SEQ ID NO: 242 - protein, 856 aa, Human immunodeficiency virus type 1
MRVKEKYQHLWRWGWRWGTMLLGMLMICSATEKLWVTVYYGVPVWKEATTTLFCASDAKAYDTEVHNVWATHACVPTDPNPQEVVLVNVTENFNMWKNDMVEQMHEDIISLWDQSLKPCVKLTPLCVSLKCTDLKNDTNTNSSSGRMIMEKGEIKNCSFNISTSIRGKVQKEYAFFYKLDIIPIDNDTTSYTLTSCNTSVITQACPKVSFEPIPIHYCAPAGFAILKCNNKTFNGTGPCTNVSTVQCTHGIRPVVSTQLLLNGSLAEEEVVIRSANFTDNAKTIIVQLNQSVEINCTRPNNNTRKSIRIQRGPGRAFVTIGKIGNMRQAHCNISRAKWNNTLKQIDSKLREQFGNNKTIIFKQSSGGDPEIVTHSFNCGGEFFYCNSTQLFNSTWFNSTWSTKGSNNTEGSDTITLPCRIKQIINMWQEVGKAMYAPPISGQIRCSSNITGLLLTRDGGNSNNESEIFRPGGGDMRDNWRSELYKYKVVKIEPLGVAPTKAKRRVVQREKRAVGIGALFLGFLGAAGSTMGAASMTLTVQARQLLSGIVQQQNNLLRAIEAQQHLLQLTVWGIKQLQARILAVERFLKDQQLLGIWGCSGKLICTTAVPWNASWSNKSLEQIWNNMTWMEWDREINNYTSLIHSLIEESQNQQEKNEQELLELDKWASLWNWFNITNWLWYIKLFIMIVGGLVGLRIVFAVLSVVNRVRQGYSPLSFQTHLPIPRGPDRPEGIEEEGGERDRDRSIRLVNGSLALIWDDLRSLCLFSYHRLRDLLLIVTRIVELLGRRGWEALKYWWNLLQYWSQELKNSAVSLLNATAIAVAEGTDRVIEVVQGAYRAIRHIPRRIRQGLERILL

SEQ ID NO: 243 - protein, 856 aa, Human immunodeficiency virus type 1
MRVKEKYQHLWRWGWRWGTMLLGMLMICSATEKLWVTVYYGVPVWKEATTTLFCASDAKAYDTEVHNVWATHACVPTDPNPQEVVLVNVTENFNMWKNDMVEQMHEDIISLWDQSLKPCVKLTPLCVSLKCTDLKNDTNTNSSSGRMIMEKGEIKNCSFNISTSIRGKVQKEYAFFYKLDIIPIDNDTTSYTLTSCNTSVITQACPKVSFEPIPIHYCAPAGFAILKCNNKTFNGTGPCTNVSTVQCTHGIRPVVSTQLLLNGSLAEEEVVIRSANFTDNAKTIIVQLNQSVEINCTRPNNNTRKSIRIQRGPGRAFVTIGKIGNMRQAHCNISRAKWNNTLKQIDSKLREQFGNNKTIIFKQSSGGDPEIVTHSFNCGGEFFYCNSTQLFNSTWFNSTWSTKGSNNTEGSDTITLPCRIKQIINMWQEVGKAMYAPPISGQIRCSSNITGLLLTRDGGNSNNESEIFRPGGGDMRDNWRSELYKYKVVKIEPLGVAPTKAKRRVVQREKRAVGIGALFLGFLGAAGSTMGAASMTLTVQARQLLSGIVQQQNNLLRAIEAQQHLLQLTVWGIKQLQARILAVERGLKDQQLLGIWGCSGKLICTTAVPWNASWSNKSLEQIWNNMTWMEWDREINNYTSLIHSLIEESQNQQEKNEQELLELDKWASLWNWFNITNWLWYIKLFIMIVGGLVGLRIVFAVLSVVNRVRQGYSPLSFQTHLPIPRGPDRPEGIEEEGGERDRDRSIRLVNGSLALIWDDLRSLCLFSYHRLRDLLLIVTRIVELLGRRGWEALKYWWNLLQYWSQELKNSAVSLLNATAIAVAEGTDRVIEVVQGAYRAIRHIPRRIRQGLERILL

SEQ ID NO: 244 - protein, 856 aa, Human immunodeficiency virus type 1
MRVKEKYQHLWRWGWRWGTMLLGMLMICSATEKLWVTVYYGVPVWKEATTTLFCASDAKAYDTEVHNVWATHACVPTDPNPQEVVLVNVTENFNMWKNDMVEQMHEDIISLWDQSLKPCVKLTPLCVSLKCTDLKNDTNTNSSSGRMIMEKGEIKNCSFNISTSIRGKVQKEYAFFYKLDIIPIDNDTTSYTLTSCNTSVITQACPKVSFEPIPIHYCAPAGFAILKCNNKTFNGTGPCTNVSTVQCTHGIRPVVSTQLLLNGSLAEEEVVIRSANFTDNAKTIIVQLNQSVEINCTRPNNNTRKSIRIQRGPGRAFVTIGKIGNMRQAHCNISRAKWNNTLKQIDSKLREQFGNNKTIIFKQSSGGDPEIVTHSFNCGGEFFYCNSTQLFNSTWFNSTWSTKGSNNTEGSDTITLPCRIKQIINMWQEVGKAMYAPPISGQIRCSSNITGLLLTRDGGNSNNESEIFRPGGGDMRDNWRSELYKYKVVKIEPLGVAPTKAKRRVVQREKRAVGIGALFLGFLGAAGSTMGAASMTLTVQARQLLSGIVQQQNNLLRAIEAQQHLLQLTVWGIKQLQARILAVERLLKDQQLLGIWGCSGKLICTTAVPWNASWSNKSLEQIWNNMTWMEWDREINNYTSLIHSLIEESQNQQEKNEQELLELDKWASLWNWFNITNWLWYIKLFIMIVGGLVGLRIVFAVLSVVNRVRQGYSPLSFQTHLPIPRGPDRPEGIEEEGGERDRDRSIRLVNGSLALIWDDLRSLCLFSYHRLRDLLLIVTRIVELLGRRGWEALKYWWNLLQYWSQELKNSAVSLLNATAIAVAEGTDRVIEVVQGAYRAIRHIPRRIRQGLERILL

SEQ ID NO: 245 - protein, 856 aa, Human immunodeficiency virus type 1
MRVKEKYQHLWRWGWRWGTMLLGMLMICSATEKLWVTVYYGVPVWKEATTTLFCASDAKAYDTEVHNVWATHACVPTDPNPQEVVLVNVTENFNMWKNDMVEQMHEDIISLWDQSLKPCVKLTPLCVSLKCTDLKNDTNTNSSSGRMIMEKGEIKNCSFNISTSIRGKVQKEYAFFYKLDIIPIDNDTTSYTLTSCNTSVITQACPKVSFEPIPIHYCAPAGFAILKCNNKTFNGTGPCTNVSTVQCTHGIRPVVSTQLLLNGSLAEEEVVIRSANFTDNAKTIIVQLNQSVEINCTRPNNNTRKSIRIQRGPGRAFVTIGKIGNMRQAHCNISRAKWNNTLKQIDSKLREQFGNNKTIIFKQSSGGDPEIVTHSFNCGGEFFYCNSTQLFNSTWFNSTWSTKGSNNTEGSDTITLPCRIKQIINMWQEVGKAMYAPPISGQIRCSSNITGLLLTRDGGNSNNESEIFRPGGGDMRDNWRSELYKYKVVKIEPLGVAPTKAKRRVVQREKRAVGIGALFLGFLGAAGSTMGAASMTLTVQARQLLSGIVQQQNNLLRAIEAQQHLLQLTVWGIKQLQARILAVERRLKDQQLLGIWGCSGKLICTTAVPWNASWSNKSLEQIWNNMTWMEWDREINNYTSLIHSLIEESQNQQEKNEQELLELDKWASLWNWFNITNWLWYIKLFIMIVGGLVGLRIVFAVLSVVNRVRQGYSPLSFQTHLPIPRGPDRPEGIEEEGGERDRDRSIRLVNGSLALIWDDLRSLCLFSYHRLRDLLLIVTRIVELLGRRGWEALKYWWNLLQYWSQELKNSAVSLLNATAIAVAEGTDRVIEVVQGAYRAIRHIPRRIRQGLERILL

SEQ ID NO: 246 - protein, 856 aa, Human immunodeficiency virus type 1
MRVKEKYQHLWRWGWRWGTMLLGMLMICSATEKLWVTVYYGVPVWKEATTTLFCASDAKAYDTEVHNVWATHACVPTDPNPQEVVLVNVTENFNMWKNDMVEQMHEDIISLWDQSLKPCVKLTPLCVSLKCTDLKNDTNTNSSSGRMIMEKGEIKNCSFNISTSIRGKVQKEYAFFYKLDIIPIDNDTTSYTLTSCNTSVITQACPKVSFEPIPIHYCAPAGFAILKCNNKTFNGTGPCTNVSTVQCTHGIRPVVSTQLLLNGSLAEEEVVIRSANFTDNAKTIIVQLNQSVEINCTRPNNNTRKSIRIQRGPGRAFVTIGKIGNMRQAHCNISRAKWNNTLKQIDSKLREQFGNNKTIIFKQSSGGDPEIVTHSFNCGGEFFYCNSTQLFNSTWFNSTWSTKGSNNTEGSDTITLPCRIKQIINMWQEVGKAMYAPPISGQIRCSSNITGLLLTRDGGNSNNESEIFRPGGGDMRDNWRSELYKYKVVKIEPLGVAPTKAKRRVVQREKRAVGIGALFLGFLGAAGSTMGAASMTLTVQARQLLSGIVQQQNNLLRAIEAQQHLLQLTVWGIKQLQARILAVERYAKDQQLLGIWGCSGKLICTTAVPWNASWSNKSLEQIWNNMTWMEWDREINNYTSLIHSLIEESQNQQEKNEQELLELDKWASLWNWFNITNWLWYIKLFIMIVGGLVGLRIVFAVLSVVNRVRQGYSPLSFQTHLPIPRGPDRPEGIEEEGGERDRDRSIRLVNGSLALIWDDLRSLCLFSYHRLRDLLLIVTRIVELLGRRGWEALKYWWNLLQYWSQELKNSAVSLLNATAIAVAEGTDRVIEVVQGAYRAIRHIPRRIRQGLERILL

SEQ ID NO: 247 - protein, 856 aa, Human immunodeficiency virus type 1
MRVKEKYQHLWRWGWRWGTMLLGMLMICSATEKLWVTVYYGVPVWKEATTTLFCASDAKAYDTEVHNVWATHACVPTDPNPQEVVLVNVTENFNMWKNDMVEQMHEDIISLWDQSLKPCVKLTPLCVSLKCTDLKNDTNTNSSSGRMIMEKGEIKNCSFNISTSIRGKVQKEYAFFYKLDIIPIDNDTTSYTLTSCNTSVITQACPKVSFEPIPIHYCAPAGFAILKCNNKTFNGTGPCTNVSTVQCTHGIRPVVSTQLLLNGSLAEEEVVIRSANFTDNAKTIIVQLNQSVEINCTRPNNNTRKSIRIQRGPGRAFVTIGKIGNMRQAHCNISRAKWNNTLKQIDSKLREQFGNNKTIIFKQSSGGDPEIVTHSFNCGGEFFYCNSTQLFNSTWFNSTWSTKGSNNTEGSDTITLPCRIKQIINMWQEVGKAMYAPPISGQIRCSSNITGLLLTRDGGNSNNESEIFRPGGGDMRDNWRSELYKYKVVKIEPLGVAPTKAKRRVVQREKRAVGIGALFLGFLGAAGSTMGAASMTLTVQARQLLSGIVQQQNNLLRAIEAQQHLLQLTVWGIKQLQARILAVERYFKDQQLLGIWGCSGKLICTTAVPWNASWSNKSLEQIWNNMTWMEWDREINNYTSLIHSLIEESQNQQEKNEQELLELDKWASLWNWFNITNWLWYIKLFIMIVGGLVGLRIVFAVLSVVNRVRQGYSPLSFQTHLPIPRGPDRPEGIEEEGGERDRDRSIRLVNGSLALIWDDLRSLCLFSYHRLRDLLLIVTRIVELLGRRGWEALKYWWNLLQYWSQELKNSAVSLLNATAIAVAEGTDRVIEVVQGAYRAIRHIPRRIRQGLERILL

SEQ ID NO: 248 - protein, 856 aa, Human immunodeficiency virus type 1
MRVKEKYQHLWRWGWRWGTMLLGMLMICSATEKLWVTVYYGVPVWKEATTTLFCASDAKAYDTEVHNVWATHACVPTDPNPQEVVLVNVTENFNMWKNDMVEQMHEDIISLWDQSLKPCVKLTPLCVSLKCTDLKNDTNTNSSSGRMIMEKGEIKNCSFNISTSIRGKVQKEYAFFYKLDIIPIDNDTTSYTLTSCNTSVITQACPKVSFEPIPIHYCAPAGFAILKCNNKTFNGTGPCTNVSTVQCTHGIRPVVSTQLLLNGSLAEEEVVIRSANFTDNAKTIIVQLNQSVEINCTRPNNNTRKSIRIQRGPGRAFVTIGKIGNMRQAHCNISRAKWNNTLKQIDSKLREQFGNNKTIIFKQSSGGDPEIVTHSFNCGGEFFYCNSTQLFNSTWFNSTWSTKGSNNTEGSDTITLPCRIKQIINMWQEVGKAMYAPPISGQIRCSSNITGLLLTRDGGNSNNESEIFRPGGGDMRDNWRSELYKYKVVKIEPLGVAPTKAKRRVVQREKRAVGIGALFLGFLGAAGSTMGAASMTLTVQARQLLSGIVQQQNNLLRAIEAQQHLLQLTVWGIKQLQARILAVERYGKDQQLLGIWGCSGKLICTTAVPWNASWSNKSLEQIWNNMTWMEWDREINNYTSLIHSLIEESQNQQEKNEQELLELDKWASLWNWFNITNWLWYIKLFIMIVGGLVGLRIVFAVLSVVNRVRQGYSPLSFQTHLPIPRGPDRPEGIEEEGGERDRDRSIRLVNGSLALIWDDLRSLCLFSYHRLRDLLLIVTRIVELLGRRGWEALKYWWNLLQYWSQELKNSAVSLLNATAIAVAEGTDRVIEVVQGAYRAIRHIPRRIRQGLERILL

SEQ ID NO: 249 - protein, 856 aa, Human immunodeficiency virus type 1
MRVKEKYQHLWRWGWRWGTMLLGMLMICSATEKLWVTVYYGVPVWKEATTTLFCASDAKAYDTEVHNVWATHACVPTDPNPQEVVLVNVTENFNMWKNDMVEQMHEDIISLWDQSLKPCVKLTPLCVSLKCTDLKNDTNTNSSSGRMIMEKGEIKNCSFNISTSIRGKVQKEYAFFYKLDIIPIDNDTTSYTLTSCNTSVITQACPKVSFEPIPIHYCAPAGFAILKCNNKTFNGTGPCTNVSTVQCTHGIRPVVSTQLLLNGSLAEEEVVIRSANFTDNAKTIIVQLNQSVEINCTRPNNNTRKSIRIQRGPGRAFVTIGKIGNMRQAHCNISRAKWNNTLKQIDSKLREQFGNNKTIIFKQSSGGDPEIVTHSFNCGGEFFYCNSTQLFNSTWFNSTWSTKGSNNTEGSDTITLPCRIKQIINMWQEVGKAMYAPPISGQIRCSSNITGLLLTRDGGNSNNESEIFRPGGGDMRDNWRSELYKYKVVKIEPLGVAPTKAKRRVVQREKRAVGIGALFLGFLGAAGSTMGAASMTLTVQARQLLSGIVQQQNNLLRAIEAQQHLLQLTVWGIKQLQARILAVERYRKDQQLLGIWGCSGKLICTTAVPWNASWSNKSLEQIWNNMTWMEWDREINNYTSLIHSLIEESQNQQEKNEQELLELDKWASLWNWFNITNWLWYIKLFIMIVGGLVGLRIVFAVLSVVNRVRQGYSPLSFQTHLPIPRGPDRPEGIEEEGGERDRDRSIRLVNGSLALIWDDLRSLCLFSYHRLRDLLLIVTRIVELLGRRGWEALKYWWNLLQYWSQELKNSAVSLLNATAIAVAEGTDRVIEVVQGAYRAIRHIPRRIRQGLERILL

SEQ ID NO: 250 - protein, 856 aa, Human immunodeficiency virus type 1
MRVKEKYQHLWRWGWRWGTMLLGMLMICSATEKLWVTVYYGVPVWKEATTTLFCASDAKAYDTEVHNVWATHACVPTDPNPQEVVLVNVTENFNMWKNDMVEQMHEDIISLWDQSLKPCVKLTPLCVSLKCTDLKNDTNTNSSSGRMIMEKGEIKNCSFNISTSIRGKVQKEYAFFYKLDIIPIDNDTTSYTLTSCNTSVITQACPKVSFEPIPIHYCAPAGFAILKCNNKTFNGTGPCTNVSTVQCTHGIRPVVSTQLLLNGSLAEEEVVIRSANFTDNAKTIIVQLNQSVEINCTRPNNNTRKSIRIQRGPGRAFVTIGKIGNMRQAHCNISRAKWNNTLKQIDSKLREQFGNNKTIIFKQSSGGDPEIVTHSFNCGGEFFYCNSTQLFNSTWFNSTWSTKGSNNTEGSDTITLPCRIKQIINMWQEVGKAMYAPPISGQIRCSSNITGLLLTRDGGNSNNESEIFRPGGGDMRDNWRSELYKYKVVKIEPLGVAPTKAKRRVVQREKRAVGIGALFLGFLGAAGSTMGAASMTLTVQARQLLSGIVQQQNNLLRAIEAQQHLLQLTVWGIKQLQARILAVERAAKDQQLLGIWGCSGKLICTTAVPWNASWSNKSLEQIWNNMTWMEWDREINNYTSLIHSLIEESQNQQEKNEQELLELDKWASLWNWFNITNWLWYIKLFIMIVGGLVGLRIVFAVLSVVNRVRQGYSPLSFQTHLPIPRGPDRPEGIEEEGGERDRDRSIRLVNGSLALIWDDLRSLCLFSYHRLRDLLLIVTRIVELLGRRGWEALKYWWNLLQYWSQELKNSAVSLLNATAIAVAEGTDRVIEVVQGAYRAIRHIPRRIRQGLERILL

SEQ ID NO: 251 - protein, 856 aa, Human immunodeficiency virus type 1
MRVKEKYQHLWRWGWRWGTMLLGMLMICSATEKLWVTVYYGVPVWKEATTTLFCASDAKAYDTEVHNVWATHACVPTDPNPQEVVLVNVTENFNMWKNDMVEQMHEDIISLWDQSLKPCVKLTPLCVSLKCTDLKNDTNTNSSSGRMIMEKGEIKNCSFNISTSIRGKVQKEYAFFYKLDIIPIDNDTTSYTLTSCNTSVITQACPKVSFEPIPIHYCAPAGFAILKCNNKTFNGTGPCTNVSTVQCTHGIRPVVSTQLLLNGSLAEEEVVIRSANFTDNAKTIIVQLNQSVEINCTRPNNNTRKSIRIQRGPGRAFVTIGKIGNMRQAHCNISRAKWNNTLKQIDSKLREQFGNNKTIIFKQSSGGDPEIVTHSFNCGGEFFYCNSTQLFNSTWFNSTWSTKGSNNTEGSDTITLPCRIKQIINMWQEVGKAMYAPPISGQIRCSSNITGLLLTRDGGNSNNESEIFRPGGGDMRDNWRSELYKYKVVKIEPLGVAPTKAKRRVVQREKRAVGIGALFLGFLGAAGSTMGAASMTLTVQARQLLSGIVQQQNNLLRAIEAQQHLLQLTVWGIKQLQARILAVERAFKDQQLLGIWGCSGKLICTTAVPWNASWSNKSLEQIWNNMTWMEWDREINNYTSLIHSLIEESQNQQEKNEQELLELDKWASLWNWFNITNWLWYIKLFIMIVGGLVGLRIVFAVLSVVNRVRQGYSPLSFQTHLPIPRGPDRPEGIEEEGGERDRDRSIRLVNGSLALIWDDLRSLCLFSYHRLRDLLLIVTRIVELLGRRGWEALKYWWNLLQYWSQELKNSAVSLLNATAIAVAEGTDRVIEVVQGAYRAIRHIPRRIRQGLERILL

SEQ ID NO: 252 - protein, 856 aa, Human immunodeficiency virus type 1
MRVKEKYQHLWRWGWRWGTMLLGMLMICSATEKLWVTVYYGVPVWKEATTTLFCASDAKAYDTEVHNVWATHACVPTDPNPQEVVLVNVTENFNMWKNDMVEQMHEDIISLWDQSLKPCVKLTPLCVSLKCTDLKNDTNTNSSSGRMIMEKGEIKNCSFNISTSIRGKVQKEYAFFYKLDIIPIDNDTTSYTLTSCNTSVITQACPKVSFEPIPIHYCAPAGFAILKCNNKTFNGTGPCTNVSTVQCTHGIRPVVSTQLLLNGSLAEEEVVIRSANFTDNAKTIIVQLNQSVEINCTRPNNNTRKSIRIQRGPGRAFVTIGKIGNMRQAHCNISRAKWNNTLKQIDSKLREQFGNNKTIIFKQSSGGDPEIVTHSFNCGGEFFYCNSTQLFNSTWFNSTWSTKGSNNTEGSDTITLPCRIKQIINMWQEVGKAMYAPPISGQIRCSSNITGLLLTRDGGNSNNESEIFRPGGGDMRDNWRSELYKYKVVKIEPLGVAPTKAKRRVVQREKRAVGIGALFLGFLGAAGSTMGAASMTLTVQARQLLSGIVQQQNNLLRAIEAQQHLLQLTVWGIKQLQARILAVERAGKDQQLLGIWGCSGKLICTTAVPWNASWSNKSLEQIWNNMTWMEWDREINNYTSLIHSLIEESQNQQEKNEQELLELDKWASLWNWFNITNWLWYIKLFIMIVGGLVGLRIVFAVLSVVNRVRQGYSPLSFQTHLPIPRGPDRPEGIEEEGGERDRDRSIRLVNGSLALIWDDLRSLCLFSYHRLRDLLLIVTRIVELLGRRGWEALKYWWNLLQYWSQELKNSAVSLLNATAIAVAEGTDRVIEVVQGAYRAIRHIPRRIRQGLERILL

SEQ ID NO: 253 - protein, 856 aa, Human immunodeficiency virus type 1
MRVKEKYQHLWRWGWRWGTMLLGMLMICSATEKLWVTVYYGVPVWKEATTTLFCASDAKAYDTEVHNVWATHACVPTDPNPQEVVLVNVTENFNMWKNDMVEQMHEDIISLWDQSLKPCVKLTPLCVSLKCTDLKNDTNTNSSSGRMIMEKGEIKNCSFNISTSIRGKVQKEYAFFYKLDIIPIDNDTTSYTLTSCNTSVITQACPKVSFEPIPIHYCAPAGFAILKCNNKTFNGTGPCTNVSTVQCTHGIRPVVSTQLLLNGSLAEEEVVIRSANFTDNAKTIIVQLNQSVEINCTRPNNNTRKSIRIQRGPGRAFVTIGKIGNMRQAHCNISRAKWNNTLKQIDSKLREQFGNNKTIIFKQSSGGDPEIVTHSFNCGGEFFYCNSTQLFNSTWFNSTWSTKGSNNTEGSDTITLPCRIKQIINMWQEVGKAMYAPPISGQIRCSSNITGLLLTRDGGNSNNESEIFRPGGGDMRDNWRSELYKYKVVKIEPLGVAPTKAKRRVVQREKRAVGIGALFLGFLGAAGSTMGAASMTLTVQARQLLSGIVQQQNNLLRAIEAQQHLLQLTVWGIKQLQARILAVERARKDQQLLGIWGCSGKLICTTAVPWNASWSNKSLEQIWNNMTWMEWDREINNYTSLIHSLIEESQNQQEKNEQELLELDKWASLWNWFNITNWLWYIKLFIMIVGGLVGLRIVFAVLSVVNRVRQGYSPLSFQTHLPIPRGPDRPEGIEEEGGERDRDRSIRLVNGSLALIWDDLRSLCLFSYHRLRDLLLIVTRIVELLGRRGWEALKYWWNLLQYWSQELKNSAVSLLNATAIAVAEGTDRVIEVVQGAYRAIRHIPRRIRQGLERILL

SEQ ID NO: 254 - protein, 856 aa, Human immunodeficiency virus type 1
MRVKEKYQHLWRWGWRWGTMLLGMLMICSATEKLWVTVYYGVPVWKEATTTLFCASDAKAYDTEVHNVWATHACVPTDPNPQEVVLVNVTENFNMWKNDMVEQMHEDIISLWDQSLKPCVKLTPLCVSLKCTDLKNDTNTNSSSGRMIMEKGEIKNCSFNISTSIRGKVQKEYAFFYKLDIIPIDNDTTSYTLTSCNTSVITQACPKVSFEPIPIHYCAPAGFAILKCNNKTFNGTGPCTNVSTVQCTHGIRPVVSTQLLLNGSLAEEEVVIRSANFTDNAKTIIVQLNQSVEINCTRPNNNTRKSIRIQRGPGRAFVTIGKIGNMRQAHCNISRAKWNNTLKQIDSKLREQFGNNKTIIFKQSSGGDPEIVTHSFNCGGEFFYCNSTQLFNSTWFNSTWSTKGSNNTEGSDTITLPCRIKQIINMWQEVGKAMYAPPISGQIRCSSNITGLLLTRDGGNSNNESEIFRPGGGDMRDNWRSELYKYKVVKIEPLGVAPTKAKRRVVQREKRAVGIGALFLGFLGAAGSTMGAASMTLTVQARQLLSGIVQQQNNLLRAIEAQQHLLQLTVWGIKQLQARILAVERFAKDQQLLGIWGCSGKLICTTAVPWNASWSNKSLEQIWNNMTWMEWDREINNYTSLIHSLIEESQNQQEKNEQELLELDKWASLWNWFNITNWLWYIKLFIMIVGGLVGLRIVFAVLSVVNRVRQGYSPLSFQTHLPIPRGPDRPEGIEEEGGERDRDRSIRLVNGSLALIWDDLRSLCLFSYHRLRDLLLIVTRIVELLGRRGWEALKYWWNLLQYWSQELKNSAVSLLNATAIAVAEGTDRVIEVVQGAYRAIRHIPRRIRQGLERILL

SEQ ID NO: 255 - protein, 856 aa, Human immunodeficiency virus type 1
MRVKEKYQHLWRWGWRWGTMLLGMLMICSATEKLWVTVYYGVPVWKEATTTLFCASDAKAYDTEVHNVWATHACVPTDPNPQEVVLVNVTENFNMWKNDMVEQMHEDIISLWDQSLKPCVKLTPLCVSLKCTDLKNDTNTNSSSGRMIMEKGEIKNCSFNISTSIRGKVQKEYAFFYKLDIIPIDNDTTSYTLTSCNTSVITQACPKVSFEPIPIHYCAPAGFAILKCNNKTFNGTGPCTNVSTVQCTHGIRPVVSTQLLLNGSLAEEEVVIRSANFTDNAKTIIVQLNQSVEINCTRPNNNTRKSIRIQRGPGRAFVTIGKIGNMRQAHCNISRAKWNNTLKQIDSKLREQFGNNKTIIFKQSSGGDPEIVTHSFNCGGEFFYCNSTQLFNSTWFNSTWSTKGSNNTEGSDTITLPCRIKQIINMWQEVGKAMYAPPISGQIRCSSNITGLLLTRDGGNSNNESEIFRPGGGDMRDNWRSELYKYKVVKIEPLGVAPTKAKRRVVQREKRAVGIGALFLGFLGAAGSTMGAASMTLTVQARQLLSGIVQQQNNLLRAIEAQQHLLQLTVWGIKQLQARILAVERFFKDQQLLGIWGCSGKLICTTAVPWNASWSNKSLEQIWNNMTWMEWDREINNYTSLIHSLIEESQNQQEKNEQELLELDKWASLWNWFNITNWLWYIKLFIMIVGGLVGLRIVFAVLSVVNRVRQGYSPLSFQTHLPIPRGPDRPEGIEEEGGERDRDRSIRLVNGSLALIWDDLRSLCLFSYHRLRDLLLIVTRIVELLGRRGWEALKYWWNLLQYWSQELKNSAVSLLNATAIAVAEGTDRVIEVVQGAYRAIRHIPRRIRQGLERILL

SEQ ID NO: 256 - protein, 856 aa, Human immunodeficiency virus type 1
MRVKEKYQHLWRWGWRWGTMLLGMLMICSATEKLWVTVYYGVPVWKEATTTLFCASDAKAYDTEVHNVWATHACVPTDPNPQEVVLVNVTENFNMWKNDMVEQMHEDIISLWDQSLKPCVKLTPLCVSLKCTDLKNDTNTNSSSGRMIMEKGEIKNCSFNISTSIRGKVQKEYAFFYKLDIIPIDNDTTSYTLTSCNTSVITQACPKVSFEPIPIHYCAPAGFAILKCNNKTFNGTGPCTNVSTVQCTHGIRPVVSTQLLLNGSLAEEEVVIRSANFTDNAKTIIVQLNQSVEINCTRPNNNTRKSIRIQRGPGRAFVTIGKIGNMRQAHCNISRAKWNNTLKQIDSKLREQFGNNKTIIFKQSSGGDPEIVTHSFNCGGEFFYCNSTQLFNSTWFNSTWSTKGSNNTEGSDTITLPCRIKQIINMWQEVGKAMYAPPISGQIRCSSNITGLLLTRDGGNSNNESEIFRPGGGDMRDNWRSELYKYKVVKIEPLGVAPTKAKRRVVQREKRAVGIGALFLGFLGAAGSTMGAASMTLTVQARQLLSGIVQQQNNLLRAIEAQQHLLQLTVWGIKQLQARILAVERFGKDQQLLGIWGCSGKLICTTAVPWNASWSNKSLEQIWNNMTWMEWDREINNYTSLIHSLIEESQNQQEKNEQELLELDKWASLWNWFNITNWLWYIKLFIMIVGGLVGLRIVFAVLSVVNRVRQGYSPLSFQTHLPIPRGPDRPEGIEEEGGERDRDRSIRLVNGSLALIWDDLRSLCLFSYHRLRDLLLIVTRIVELLGRRGWEALKYWWNLLQYWSQELKNSAVSLLNATAIAVAEGTDRVIEVVQGAYRAIRHIPRRIRQGLERILL

SEQ ID NO: 257 - protein, 856 aa, Human immunodeficiency virus type 1
MRVKEKYQHLWRWGWRWGTMLLGMLMICSATEKLWVTVYYGVPVWKEATTTLFCASDAKAYDTEVHNVWATHACVPTDPNPQEVVLVNVTENFNMWKNDMVEQMHEDIISLWDQSLKPCVKLTPLCVSLKCTDLKNDTNTNSSSGRMIMEKGEIKNCSFNISTSIRGKVQKEYAFFYKLDIIPIDNDTTSYTLTSCNTSVITQACPKVSFEPIPIHYCAPAGFAILKCNNKTFNGTGPCTNVSTVQCTHGIRPVVSTQLLLNGSLAEEEVVIRSANFTDNAKTIIVQLNQSVEINCTRPNNNTRKSIRIQRGPGRAFVTIGKIGNMRQAHCNISRAKWNNTLKQIDSKLREQFGNNKTIIFKQSSGGDPEIVTHSFNCGGEFFYCNSTQLFNSTWFNSTWSTKGSNNTEGSDTITLPCRIKQIINMWQEVGKAMYAPPISGQIRCSSNITGLLLTRDGGNSNNESEIFRPGGGDMRDNWRSELYKYKVVKIEPLGVAPTKAKRRVVQREKRAVGIGALFLGFLGAAGSTMGAASMTLTVQARQLLSGIVQQQNNLLRAIEAQQHLLQLTVWGIKQLQARILAVERFRKDQQLLGIWGCSGKLICTTAVPWNASWSNKSLEQIWNNMTWMEWDREINNYTSLIHSLIEESQNQQEKNEQELLELDKWASLWNWFNITNWLWYIKLFIMIVGGLVGLRIVFAVLSVVNRVRQGYSPLSFQTHLPIPRGPDRPEGIEEEGGERDRDRSIRLVNGSLALIWDDLRSLCLFSYHRLRDLLLIVTRIVELLGRRGWEALKYWWNLLQYWSQELKNSAVSLLNATAIAVAEGTDRVIEVVQGAYRAIRHIPRRIRQGLERILL

SEQ ID NO: 258 - protein, 856 aa, Human immunodeficiency virus type 1
MRVKEKYQHLWRWGWRWGTMLLGMLMICSATEKLWVTVYYGVPVWKEATTTLFCASDAKAYDTEVHNVWATHACVPTDPNPQEVVLVNVTENFNMWKNDMVEQMHEDIISLWDQSLKPCVKLTPLCVSLKCTDLKNDTNTNSSSGRMIMEKGEIKNCSFNISTSIRGKVQKEYAFFYKLDIIPIDNDTTSYTLTSCNTSVITQACPKVSFEPIPIHYCAPAGFAILKCNNKTFNGTGPCTNVSTVQCTHGIRPVVSTQLLLNGSLAEEEVVIRSANFTDNAKTIIVQLNQSVEINCTRPNNNTRKSIRIQRGPGRAFVTIGKIGNMRQAHCNISRAKWNNTLKQIDSKLREQFGNNKTIIFKQSSGGDPEIVTHSFNCGGEFFYCNSTQLFNSTWFNSTWSTKGSNNTEGSDTITLPCRIKQIINMWQEVGKAMYAPPISGQIRCSSNITGLLLTRDGGNSNNESEIFRPGGGDMRDNWRSELYKYKVVKIEPLGVAPTKAKRRVVQREKRAVGIGALFLGFLGAAGSTMGAASMTLTVQARQLLSGIVQQQNNLLRAIEAQQHLLQLTVWGIKQLQARILAVERGAKDQQLLGIWGCSGKLICTTAVPWNASWSNKSLEQIWNNMTWMEWDREINNYTSLIHSLIEESQNQQEKNEQELLELDKWASLWNWFNITNWLWYIKLFIMIVGGLVGLRIVFAVLSVVNRVRQGYSPLSFQTHLPIPRGPDRPEGIEEEGGERDRDRSIRLVNGSLALIWDDLRSLCLFSYHRLRDLLLIVTRIVELLGRRGWEALKYWWNLLQYWSQELKNSAVSLLNATAIAVAEGTDRVIEVVQGAYRAIRHIPRRIRQGLERILL

SEQ ID NO: 259 - protein, 856 aa, Human immunodeficiency virus type 1
MRVKEKYQHLWRWGWRWGTMLLGMLMICSATEKLWVTVYYGVPVWKEATTTLFCASDAKAYDTEVHNVWATHACVPTDPNPQEVVLVNVTENFNMWKNDMVEQMHEDIISLWDQSLKPCVKLTPLCVSLKCTDLKNDTNTNSSSGRMIMEKGEIKNCSFNISTSIRGKVQKEYAFFYKLDIIPIDNDTTSYTLTSCNTSVITQACPKVSFEPIPIHYCAPAGFAILKCNNKTFNGTGPCTNVSTVQCTHGIRPVVSTQLLLNGSLAEEEVVIRSANFTDNAKTIIVQLNQSVEINCTRPNNNTRKSIRIQRGPGRAFVTIGKIGNMRQAHCNISRAKWNNTLKQIDSKLREQFGNNKTIIFKQSSGGDPEIVTHSFNCGGEFFYCNSTQLFNSTWFNSTWSTKGSNNTEGSDTITLPCRIKQIINMWQEVGKAMYAPPISGQIRCSSNITGLLLTRDGGNSNNESEIFRPGGGDMRDNWRSELYKYKVVKIEPLGVAPTKAKRRVVQREKRAVGIGALFLGFLGAAGSTMGAASMTLTVQARQLLSGIVQQQNNLLRAIEAQQHLLQLTVWGIKQLQARILAVERGFKDQQLLGIWGCSGKLICTTAVPWNASWSNKSLEQIWNNMTWMEWDREINNYTSLIHSLIEESQNQQEKNEQELLELDKWASLWNWFNITNWLWYIKLFIMIVGGLVGLRIVFAVLSVVNRVRQGYSPLSFQTHLPIPRGPDRPEGIEEEGGERDRDRSIRLVNGSLALIWDDLRSLCLFSYHRLRDLLLIVTRIVELLGRRGWEALKYWWNLLQYWSQELKNSAVSLLNATAIAVAEGTDRVIEVVQGAYRAIRHIPRRIRQGLERILL

SEQ ID NO: 260 - protein, 856 aa, Human immunodeficiency virus type 1
MRVKEKYQHLWRWGWRWGTMLLGMLMICSATEKLWVTVYYGVPVWKEATTTLFCASDAKAYDTEVHNVWATHACVPTDPNPQEVVLVNVTENFNMWKNDMVEQMHEDIISLWDQSLKPCVKLTPLCVSLKCTDLKNDTNTNSSSGRMIMEKGEIKNCSFNISTSIRGKVQKEYAFFYKLDIIPIDNDTTSYTLTSCNTSVITQACPKVSFEPIPIHYCAPAGFAILKCNNKTFNGTGPCTNVSTVQCTHGIRPVVSTQLLLNGSLAEEEVVIRSANFTDNAKTIIVQLNQSVEINCTRPNNNTRKSIRIQRGPGRAFVTIGKIGNMRQAHCNISRAKWNNTLKQIDSKLREQFGNNKTIIFKQSSGGDPEIVTHSFNCGGEFFYCNSTQLFNSTWFNSTWSTKGSNNTEGSDTITLPCRIKQIINMWQEVGKAMYAPPISGQIRCSSNITGLLLTRDGGNSNNESEIFRPGGGDMRDNWRSELYKYKVVKIEPLGVAPTKAKRRVVQREKRAVGIGALFLGFLGAAGSTMGAASMTLTVQARQLLSGIVQQQNNLLRAIEAQQHLLQLTVWGIKQLQARILAVERGGKDQQLLGIWGCSGKLICTTAVPWNASWSNKSLEQIWNNMTWMEWDREINNYTSLIHSLIEESQNQQEKNEQELLELDKWASLWNWFNITNWLWYIKLFIMIVGGLVGLRIVFAVLSVVNRVRQGYSPLSFQTHLPIPRGPDRPEGIEEEGGERDRDRSIRLVNGSLALIWDDLRSLCLFSYHRLRDLLLIVTRIVELLGRRGWEALKYWWNLLQYWSQELKNSAVSLLNATAIAVAEGTDRVIEVVQGAYRAIRHIPRRIRQGLERILL

SEQ ID NO: 261 - protein, 856 aa, Human immunodeficiency virus type 1
MRVKEKYQHLWRWGWRWGTMLLGMLMICSATEKLWVTVYYGVPVWKEATTTLFCASDAKAYDTEVHNVWATHACVPTDPNPQEVVLVNVTENFNMWKNDMVEQMHEDIISLWDQSLKPCVKLTPLCVSLKCTDLKNDTNTNSSSGRMIMEKGEIKNCSFNISTSIRGKVQKEYAFFYKLDIIPIDNDTTSYTLTSCNTSVITQACPKVSFEPIPIHYCAPAGFAILKCNNKTFNGTGPCTNVSTVQCTHGIRPVVSTQLLLNGSLAEEEVVIRSANFTDNAKTIIVQLNQSVEINCTRPNNNTRKSIRIQRGPGRAFVTIGKIGNMRQAHCNISRAKWNNTLKQIDSKLREQFGNNKTIIFKQSSGGDPEIVTHSFNCGGEFFYCNSTQLFNSTWFNSTWSTKGSNNTEGSDTITLPCRIKQIINMWQEVGKAMYAPPISGQIRCSSNITGLLLTRDGGNSNNESEIFRPGGGDMRDNWRSELYKYKVVKIEPLGVAPTKAKRRVVQREKRAVGIGALFLGFLGAAGSTMGAASMTLTVQARQLLSGIVQQQNNLLRAIEAQQHLLQLTVWGIKQLQARILAVERGRKDQQLLGIWGCSGKLICTTAVPWNASWSNKSLEQIWNNMTWMEWDREINNYTSLIHSLIEESQNQQEKNEQELLELDKWASLWNWFNITNWLWYIKLFIMIVGGLVGLRIVFAVLSVVNRVRQGYSPLSFQTHLPIPRGPDRPEGIEEEGGERDRDRSIRLVNGSLALIWDDLRSLCLFSYHRLRDLLLIVTRIVELLGRRGWEALKYWWNLLQYWSQELKNSAVSLLNATAIAVAEGTDRVIEVVQGAYRAIRHIPRRIRQGLERILL

SEQ ID NO: 262 - protein, 856 aa, Human immunodeficiency virus type 1
MRVKEKYQHLWRWGWRWGTMLLGMLMICSATEKLWVTVYYGVPVWKEATTTLFCASDAKAYDTEVHNVWATHACVPTDPNPQEVVLVNVTENFNMWKNDMVEQMHEDIISLWDQSLKPCVKLTPLCVSLKCTDLKNDTNTNSSSGRMIMEKGEIKNCSFNISTSIRGKVQKEYAFFYKLDIIPIDNDTTSYTLTSCNTSVITQACPKVSFEPIPIHYCAPAGFAILKCNNKTFNGTGPCTNVSTVQCTHGIRPVVSTQLLLNGSLAEEEVVIRSANFTDNAKTIIVQLNQSVEINCTRPNNNTRKSIRIQRGPGRAFVTIGKIGNMRQAHCNISRAKWNNTLKQIDSKLREQFGNNKTIIFKQSSGGDPEIVTHSFNCGGEFFYCNSTQLFNSTWFNSTWSTKGSNNTEGSDTITLPCRIKQIINMWQEVGKAMYAPPISGQIRCSSNITGLLLTRDGGNSNNESEIFRPGGGDMRDNWRSELYKYKVVKIEPLGVAPTKAKRRVVQREKRAVGIGALFLGFLGAAGSTMGAASMTLTVQARQLLSGIVQQQNNLLRAIEAQQHLLQLTVWGIKQLQARILAVERLAKDQQLLGIWGCSGKLICTTAVPWNASWSNKSLEQIWNNMTWMEWDREINNYTSLIHSLIEESQNQQEKNEQELLELDKWASLWNWFNITNWLWYIKLFIMIVGGLVGLRIVFAVLSVVNRVRQGYSPLSFQTHLPIPRGPDRPEGIEEEGGERDRDRSIRLVNGSLALIWDDLRSLCLFSYHRLRDLLLIVTRIVELLGRRGWEALKYWWNLLQYWSQELKNSAVSLLNATAIAVAEGTDRVIEVVQGAYRAIRHIPRRIRQGLERILL

SEQ ID NO: 263 - protein, 856 aa, Human immunodeficiency virus type 1
MRVKEKYQHLWRWGWRWGTMLLGMLMICSATEKLWVTVYYGVPVWKEATTTLFCASDAKAYDTEVHNVWATHACVPTDPNPQEVVLVNVTENFNMWKNDMVEQMHEDIISLWDQSLKPCVKLTPLCVSLKCTDLKNDTNTNSSSGRMIMEKGEIKNCSFNISTSIRGKVQKEYAFFYKLDIIPIDNDTTSYTLTSCNTSVITQACPKVSFEPIPIHYCAPAGFAILKCNNKTFNGTGPCTNVSTVQCTHGIRPVVSTQLLLNGSLAEEEVVIRSANFTDNAKTIIVQLNQSVEINCTRPNNNTRKSIRIQRGPGRAFVTIGKIGNMRQAHCNISRAKWNNTLKQIDSKLREQFGNNKTIIFKQSSGGDPEIVTHSFNCGGEFFYCNSTQLFNSTWFNSTWSTKGSNNTEGSDTITLPCRIKQIINMWQEVGKAMYAPPISGQIRCSSNITGLLLTRDGGNSNNESEIFRPGGGDMRDNWRSELYKYKVVKIEPLGVAPTKAKRRVVQREKRAVGIGALFLGFLGAAGSTMGAASMTLTVQARQLLSGIVQQQNNLLRAIEAQQHLLQLTVWGIKQLQARILAVERLFKDQQLLGIWGCSGKLICTTAVPWNASWSNKSLEQIWNNMTWMEWDREINNYTSLIHSLIEESQNQQEKNEQELLELDKWASLWNWFNITNWLWYIKLFIMIVGGLVGLRIVFAVLSVVNRVRQGYSPLSFQTHLPIPRGPDRPEGIEEEGGERDRDRSIRLVNGSLALIWDDLRSLCLFSYHRLRDLLLIVTRIVELLGRRGWEALKYWWNLLQYWSQELKNSAVSLLNATAIAVAEGTDRVIEVVQGAYRAIRHIPRRIRQGLERILL

SEQ ID NO: 264 - protein, 856 aa, Human immunodeficiency virus type 1
MRVKEKYQHLWRWGWRWGTMLLGMLMICSATEKLWVTVYYGVPVWKEATTTLFCASDAKAYDTEVHNVWATHACVPTDPNPQEVVLVNVTENFNMWKNDMVEQMHEDIISLWDQSLKPCVKLTPLCVSLKCTDLKNDTNTNSSSGRMIMEKGEIKNCSFNISTSIRGKVQKEYAFFYKLDIIPIDNDTTSYTLTSCNTSVITQACPKVSFEPIPIHYCAPAGFAILKCNNKTFNGTGPCTNVSTVQCTHGIRPVVSTQLLLNGSLAEEEVVIRSANFTDNAKTIIVQLNQSVEINCTRPNNNTRKSIRIQRGPGRAFVTIGKIGNMRQAHCNISRAKWNNTLKQIDSKLREQFGNNKTIIFKQSSGGDPEIVTHSFNCGGEFFYCNSTQLFNSTWFNSTWSTKGSNNTEGSDTITLPCRIKQIINMWQEVGKAMYAPPISGQIRCSSNITGLLLTRDGGNSNNESEIFRPGGGDMRDNWRSELYKYKVVKIEPLGVAPTKAKRRVVQREKRAVGIGALFLGFLGAAGSTMGAASMTLTVQARQLLSGIVQQQNNLLRAIEAQQHLLQLTVWGIKQLQARILAVERLGKDQQLLGIWGCSGKLICTTAVPWNASWSNKSLEQIWNNMTWMEWDREINNYTSLIHSLIEESQNQQEKNEQELLELDKWASLWNWFNITNWLWYIKLFIMIVGGLVGLRIVFAVLSVVNRVRQGYSPLSFQTHLPIPRGPDRPEGIEEEGGERDRDRSIRLVNGSLALIWDDLRSLCLFSYHRLRDLLLIVTRIVELLGRRGWEALKYWWNLLQYWSQELKNSAVSLLNATAIAVAEGTDRVIEVVQGAYRAIRHIPRRIRQGLERILL

SEQ ID NO: 265 - protein, 856 aa, Human immunodeficiency virus type 1
MRVKEKYQHLWRWGWRWGTMLLGMLMICSATEKLWVTVYYGVPVWKEATTTLFCASDAKAYDTEVHNVWATHACVPTDPNPQEVVLVNVTENFNMWKNDMVEQMHEDIISLWDQSLKPCVKLTPLCVSLKCTDLKNDTNTNSSSGRMIMEKGEIKNCSFNISTSIRGKVQKEYAFFYKLDIIPIDNDTTSYTLTSCNTSVITQACPKVSFEPIPIHYCAPAGFAILKCNNKTFNGTGPCTNVSTVQCTHGIRPVVSTQLLLNGSLAEEEVVIRSANFTDNAKTIIVQLNQSVEINCTRPNNNTRKSIRIQRGPGRAFVTIGKIGNMRQAHCNISRAKWNNTLKQIDSKLREQFGNNKTIIFKQSSGGDPEIVTHSFNCGGEFFYCNSTQLFNSTWFNSTWSTKGSNNTEGSDTITLPCRIKQIINMWQEVGKAMYAPPISGQIRCSSNITGLLLTRDGGNSNNESEIFRPGGGDMRDNWRSELYKYKVVKIEPLGVAPTKAKRRVVQREKRAVGIGALFLGFLGAAGSTMGAASMTLTVQARQLLSGIVQQQNNLLRAIEAQQHLLQLTVWGIKQLQARILAVERLRKDQQLLGIWGCSGKLICTTAVPWNASWSNKSLEQIWNNMTWMEWDREINNYTSLIHSLIEESQNQQEKNEQELLELDKWASLWNWFNITNWLWYIKLFIMIVGGLVGLRIVFAVLSVVNRVRQGYSPLSFQTHLPIPRGPDRPEGIEEEGGERDRDRSIRLVNGSLALIWDDLRSLCLFSYHRLRDLLLIVTRIVELLGRRGWEALKYWWNLLQYWSQELKNSAVSLLNATAIAVAEGTDRVIEVVQGAYRAIRHIPRRIRQGLERILL

SEQ ID NO: 266 - protein, 856 aa, Human immunodeficiency virus type 1
MRVKEKYQHLWRWGWRWGTMLLGMLMICSATEKLWVTVYYGVPVWKEATTTLFCASDAKAYDTEVHNVWATHACVPTDPNPQEVVLVNVTENFNMWKNDMVEQMHEDIISLWDQSLKPCVKLTPLCVSLKCTDLKNDTNTNSSSGRMIMEKGEIKNCSFNISTSIRGKVQKEYAFFYKLDIIPIDNDTTSYTLTSCNTSVITQACPKVSFEPIPIHYCAPAGFAILKCNNKTFNGTGPCTNVSTVQCTHGIRPVVSTQLLLNGSLAEEEVVIRSANFTDNAKTIIVQLNQSVEINCTRPNNNTRKSIRIQRGPGRAFVTIGKIGNMRQAHCNISRAKWNNTLKQIDSKLREQFGNNKTIIFKQSSGGDPEIVTHSFNCGGEFFYCNSTQLFNSTWFNSTWSTKGSNNTEGSDTITLPCRIKQIINMWQEVGKAMYAPPISGQIRCSSNITGLLLTRDGGNSNNESEIFRPGGGDMRDNWRSELYKYKVVKIEPLGVAPTKAKRRVVQREKRAVGIGALFLGFLGAAGSTMGAASMTLTVQARQLLSGIVQQQNNLLRAIEAQQHLLQLTVWGIKQLQARILAVERRAKDQQLLGIWGCSGKLICTTAVPWNASWSNKSLEQIWNNMTWMEWDREINNYTSLIHSLIEESQNQQEKNEQELLELDKWASLWNWFNITNWLWYIKLFIMIVGGLVGLRIVFAVLSVVNRVRQGYSPLSFQTHLPIPRGPDRPEGIEEEGGERDRDRSIRLVNGSLALIWDDLRSLCLFSYHRLRDLLLIVTRIVELLGRRGWEALKYWWNLLQYWSQELKNSAVSLLNATAIAVAEGTDRVIEVVQGAYRAIRHIPRRIRQGLERILL

SEQ ID NO: 267 - protein, 856 aa, Human immunodeficiency virus type 1
MRVKEKYQHLWRWGWRWGTMLLGMLMICSATEKLWVTVYYGVPVWKEATTTLFCASDAKAYDTEVHNVWATHACVPTDPNPQEVVLVNVTENFNMWKNDMVEQMHEDIISLWDQSLKPCVKLTPLCVSLKCTDLKNDTNTNSSSGRMIMEKGEIKNCSFNISTSIRGKVQKEYAFFYKLDIIPIDNDTTSYTLTSCNTSVITQACPKVSFEPIPIHYCAPAGFAILKCNNKTFNGTGPCTNVSTVQCTHGIRPVVSTQLLLNGSLAEEEVVIRSANFTDNAKTIIVQLNQSVEINCTRPNNNTRKSIRIQRGPGRAFVTIGKIGNMRQAHCNISRAKWNNTLKQIDSKLREQFGNNKTIIFKQSSGGDPEIVTHSFNCGGEFFYCNSTQLFNSTWFNSTWSTKGSNNTEGSDTITLPCRIKQIINMWQEVGKAMYAPPISGQIRCSSNITGLLLTRDGGNSNNESEIFRPGGGDMRDNWRSELYKYKVVKIEPLGVAPTKAKRRVVQREKRAVGIGALFLGFLGAAGSTMGAASMTLTVQARQLLSGIVQQQNNLLRAIEAQQHLLQLTVWGIKQLQARILAVERRFKDQQLLGIWGCSGKLICTTAVPWNASWSNKSLEQIWNNMTWMEWDREINNYTSLIHSLIEESQNQQEKNEQELLELDKWASLWNWFNITNWLWYIKLFIMIVGGLVGLRIVFAVLSVVNRVRQGYSPLSFQTHLPIPRGPDRPEGIEEEGGERDRDRSIRLVNGSLALIWDDLRSLCLFSYHRLRDLLLIVTRIVELLGRRGWEALKYWWNLLQYWSQELKNSAVSLLNATAIAVAEGTDRVIEVVQGAYRAIRHIPRRIRQGLERILL

SEQ ID NO: 268 - protein, 856 aa, Human immunodeficiency virus type 1
MRVKEKYQHLWRWGWRWGTMLLGMLMICSATEKLWVTVYYGVPVWKEATTTLFCASDAKAYDTEVHNVWATHACVPTDPNPQEVVLVNVTENFNMWKNDMVEQMHEDIISLWDQSLKPCVKLTPLCVSLKCTDLKNDTNTNSSSGRMIMEKGEIKNCSFNISTSIRGKVQKEYAFFYKLDIIPIDNDTTSYTLTSCNTSVITQACPKVSFEPIPIHYCAPAGFAILKCNNKTFNGTGPCTNVSTVQCTHGIRPVVSTQLLLNGSLAEEEVVIRSANFTDNAKTIIVQLNQSVEINCTRPNNNTRKSIRIQRGPGRAFVTIGKIGNMRQAHCNISRAKWNNTLKQIDSKLREQFGNNKTIIFKQSSGGDPEIVTHSFNCGGEFFYCNSTQLFNSTWFNSTWSTKGSNNTEGSDTITLPCRIKQIINMWQEVGKAMYAPPISGQIRCSSNITGLLLTRDGGNSNNESEIFRPGGGDMRDNWRSELYKYKVVKIEPLGVAPTKAKRRVVQREKRAVGIGALFLGFLGAAGSTMGAASMTLTVQARQLLSGIVQQQNNLLRAIEAQQHLLQLTVWGIKQLQARILAVERRGKDQQLLGIWGCSGKLICTTAVPWNASWSNKSLEQIWNNMTWMEWDREINNYTSLIHSLIEESQNQQEKNEQELLELDKWASLWNWFNITNWLWYIKLFIMIVGGLVGLRIVFAVLSVVNRVRQGYSPLSFQTHLPIPRGPDRPEGIEEEGGERDRDRSIRLVNGSLALIWDDLRSLCLFSYHRLRDLLLIVTRIVELLGRRGWEALKYWWNLLQYWSQELKNSAVSLLNATAIAVAEGTDRVIEVVQGAYRAIRHIPRRIRQGLERILL

SEQ ID NO: 269 - protein, 856 aa, Human immunodeficiency virus type 1
MRVKEKYQHLWRWGWRWGTMLLGMLMICSATEKLWVTVYYGVPVWKEATTTLFCASDAKAYDTEVHNVWATHACVPTDPNPQEVVLVNVTENFNMWKNDMVEQMHEDIISLWDQSLKPCVKLTPLCVSLKCTDLKNDTNTNSSSGRMIMEKGEIKNCSFNISTSIRGKVQKEYAFFYKLDIIPIDNDTTSYTLTSCNTSVITQACPKVSFEPIPIHYCAPAGFAILKCNNKTFNGTGPCTNVSTVQCTHGIRPVVSTQLLLNGSLAEEEVVIRSANFTDNAKTIIVQLNQSVEINCTRPNNNTRKSIRIQRGPGRAFVTIGKIGNMRQAHCNISRAKWNNTLKQIDSKLREQFGNNKTIIFKQSSGGDPEIVTHSFNCGGEFFYCNSTQLFNSTWFNSTWSTKGSNNTEGSDTITLPCRIKQIINMWQEVGKAMYAPPISGQIRCSSNITGLLLTRDGGNSNNESEIFRPGGGDMRDNWRSELYKYKVVKIEPLGVAPTKAKRRVVQREKRAVGIGALFLGFLGAAGSTMGAASMTLTVQARQLLSGIVQQQNNLLRAIEAQQHLLQLTVWGIKQLQARILAVERRRKDQQLLGIWGCSGKLICTTAVPWNASWSNKSLEQIWNNMTWMEWDREINNYTSLIHSLIEESQNQQEKNEQELLELDKWASLWNWFNITNWLWYIKLFIMIVGGLVGLRIVFAVLSVVNRVRQGYSPLSFQTHLPIPRGPDRPEGIEEEGGERDRDRSIRLVNGSLALIWDDLRSLCLFSYHRLRDLLLIVTRIVELLGRRGWEALKYWWNLLQYWSQELKNSAVSLLNATAIAVAEGTDRVIEVVQGAYRAIRHIPRRIRQGLERILL

SEQ ID NO: 270 - protein, 32 aa, Artificial Sequence
  fragemnt of lentiviral ENV protein
  misc_feature (1)..(1): Xaa can be any naturally occurring amino acid
  misc_feature (4)..(5): Xaa can be any naturally occurring amino acid
  misc_feature (7)..(8): Xaa can be any naturally occurring amino acid
  MISC_FEATURE (12)..(12): Xaa = A or S
  misc_feature (13)..(15): Xaa can be any naturally occurring amino acid
  misc_feature (18)..(18): Xaa can be any naturally occurring amino acid
  misc_feature (20)..(20): Xaa can be any naturally occurring amino acid
  misc_feature (24)..(24): Xaa can be any naturally occurring amino acid
  MISC_FEATURE (25)..(29): Xaa = no or any amino acid
  MISC_FEATURE (30)..(30): Xaa = N or S
  MISC_FEATURE (31)..(31): Xaa = E, D, N or A
  MISC_FEATURE (32)..(32): Xaa = S or T
XDQXXLXXWGCXXXXCVXTXVPWXXXXXXXXX

SEQ ID NO: 271 - protein, 115 aa, Artificial sequence
  derived from lentiviral ENV ISU
SGIVQQQNNLLRAIEAQQHLLQLTVWGIKQLQARILAVERRLKDQQLLGIWGCSGKLICTTAVPWNASWSNASLEQIWNNMTWMEWDREINNYTSLIHSLIEESQNQQEKNEQEL

SEQ ID NO: 272 - protein, 115 aa, Artificial sequence
  derived from lentiviral ENV ISU
SGIVQQQNNLLRAIEAQQHLLQLTVWGIKQLQARILAVERRLKDQQLLGIWGCSGKLICTTAVPWNASWSNGSLEQIWNNMTWMEWDREINNYTSLIHSLIEESQNQQEKNEQEL

SEQ ID NO: 273 - protein, 115 aa, Artificial sequence
  derived from lentiviral ENV ISU
SGIVQQQNNLLRAIEAQQHLLQLTVWGIKQLQARILAVERRLKDQQLLGIWGCSGKLICTTAVPWNASWSNSSLEQIWNNMTWMEWDREINNYTSLIHSLIEESQNQQEKNEQEL

SEQ ID NO: 274 - protein, 115 aa, Artificial sequence
  derived from lentiviral ENV ISU
SGIVQQQNNLLRAIEAQQHLLQLTVWGIKQLQARILAVERRLKDQQLLGIWGCSGKLICTTAVPDNASWSNKSLEQIWNNMTWMEWDREINNYTSLIHSLIEESQNQQEKNEQEL

SEQ ID NO: 275 - protein, 115 aa, Artificial sequence
  derived from lentiviral ENV ISU
SGIVQQQNNLLRAIEAQQHLLQLTVWGIKQLQARILAVERRLKDQQLLGIWGCSGKLICTTAVPANASWSNKSLEQIWNNMTWMEWDREINNYTSLIHSLIEESQNQQEKNEQEL

SEQ ID NO: 276 - protein, 115 aa, Artificial sequence
  derived from lentiviral ENV ISU
SGIVQQQNNLLRAIEAQQHLLQLTVWGIKQLQARILAVERRLKDQQLLGIWGCSGKLICTTAVPNNASWSNKSLEQIWNNMTWMEWDREINNYTSLIHSLIEESQNQQEKNEQEL

SEQ ID NO: 277 - protein, 115 aa, Artificial sequence
  derived from lentiviral ENV ISU
SGIVQQQNNLLRAIEAQQHLLQLTVWGIKQLQARILAVERRLKDQQLLGIWGCSGKLICTTAVPWNASWSNKDLEQIWNNMTWMEWDREINNYTSLIHSLIEESQNQQEKNEQEL

SEQ ID NO: 278 - protein, 115 aa, Artificial sequence
  derived from lentiviral ENV ISU
SGIVQQQNNLLRAIEAQQHLLQLTVWGIKQLQARILAVERRLKDQQLLGIWGCSGKLICTTAVPWNASWSNKALEQIWNNMTWMEWDREINNYTSLIHSLIEESQNQQEKNEQEL

SEQ ID NO: 279 - protein, 115 aa, Artificial sequence
  derived from lentiviral ENV ISU
SGIVQQQNNLLRAIEAQQHLLQLTVWGIKQLQARILAVERRLKDQQLLGIWGCSGKLICTTAVPWNASWSNKNLEQIWNNMTWMEWDREINNYTSLIHSLIEESQNQQEKNEQEL

SEQ ID NO: 280 - protein, 115 aa, Artificial sequence
  derived from lentiviral ENV ISU
SGIVQQQNNLLRAIEAQQHLLQLTVWGIKQLQARILAVERRLKDQQLLGIWGCSGKLICTTAVPWNASWSNYSLEQIWNNMTWMEWDREINNYTSLIHSLIEESQNQQEKNEQEL

SEQ ID NO: 281 - protein, 115 aa, Artificial sequence
  derived from lentiviral ENV ISU
SGIVQQQNNLLRAIEAQQHLLQLTVWGIKQLQARILAVEARLKDQQLLGIWGCSGKLICTTAVPWNASWSNASLEQIWNNMTWMEWDREINNYTSLIHSLIEESQNQQEKNEQEL

SEQ ID NO: 282 - protein, 115 aa, Artificial sequence
  derived from lentiviral ENV ISU
SGIVQQQNNLLRAIEAQQHLLQLTVWGIKQLQARILAVERRLKDQQLLGIWGCSGKLICTTAVPWNASWSNAALEQIWNNMTWMEWDREINNYTSLIHSLIEESQNQQEKNEQEL

SEQ ID NO: 283 - protein, 115 aa, Artificial Sequence
  derived from lentiviral ENV ISU
SGIVQQQNNLLRAIEAQQHLLQLTVWGIKQLQARILAVERRLKDQQLLGIWGCSGKLICTTAVPANASWSNAALEQIWNNMTWMEWDREINNYTSLIHSLIEESQNQQEKNEQEL

SEQ ID NO: 284 - protein, 861 aa, Human immunodeficiency virus type 1; identical to SEQ ID NO: 216

SEQ ID NO: 285 - protein, 861 aa, Human immunodeficiency virus type 1
MRVKEKYQHLWRWGWKWGTMLLGILMICSATEKLWVTVYYGVPVWKEATTTLFCASDAKAYDTEVHNVWATHACVPTDPNPQEVVLVNVTENFNMWKNDMVEQMHEDIISLWDQSLKPCVKLTPLCVSLKCTDLGNATNTNSSNTNSSSGEMMMEKGEIKNCSFNISTSIRGKVQKEYAFFYKLDIIPIDNDTTSYTLTSCNTSVITQACPKVSFEPIPIHYCAPAGFAILKCNNKTFNGTGPCTNVSTVQCTHGIRPVVSTQLLLNGSLAEEEVVIRSANFTDNAKTIIVQLNQSVEINCTRPNNNTRKSIRIQRGPGRAFVTIGKIGNMRQAHCNISRAKWNATLKQIASKLREQFGNNKTIIFKQSSGGDPEIVTHSFNCGGEFFYCNSTQLFNSTWFNSTWSTEGSNNTEGSDTITLPCRIKQFINMWQEVGKAMYAPPISGQIRCSSNITGLLLTRDGGNNNNGSEIFRPGGGDMRDNWRSELYKYKVVKIEPLGVAPTKAKRRVVQREKRAVGIGALFLGFLGAAGSTMGARSMTLTVQARQLLSGIVQQQNNLLRAIEAQQHLLQLTVWGIKQLQARILAVERRLKDQQLLGIWGCSGKLICTTAVPWNASWSNASLEQIWNNMTWMEWDREINNYTSLIHSLIEESQNQQEKNEQELLELDKWASLWNWFNITNWLWYIKIFIMIVGGLVGLRIVFAVLSIVNRVRQGYSPLSFQTHLPTPRGPDRPEGIEEEGGERDRDRSIRLVNGSLALIWDDLRSLCLFSYHRLRDLLLIVTRIVELLGRRGWEALKYWWNLLQYWSQELKNSAVSLLNATAIAVAEGTDRVIEVVQGACRAIRHIPRRIRQGLERILL

SEQ ID NO: 286 - protein, 861 aa, Human immunodeficiency virus type 1
MRVKEKYQHLWRWGWKWGTMLLGILMICSATEKLWVTVYYGVPVWKEATTTLFCASDAKAYDTEVHNVWATHACVPTDPNPQEVVLVNVTENFNMWKNDMVEQMHEDIISLWDQSLKPCVKLTPLCVSLKCTDLGNATNTNSSNTNSSSGEMMMEKGEIKNCSFNISTSIRGKVQKEYAFFYKLDIIPIDNDTTSYTLTSCNTSVITQACPKVSFEPIPIHYCAPAGFAILKCNNKTFNGTGPCTNVSTVQCTHGIRPVVSTQLLLNGSLAEEEVVIRSANFTDNAKTIIVQLNQSVEINCTRPNNNTRKSIRIQRGPGRAFVTIGKIGNMRQAHCNISRAKWNATLKQIASKLREQFGNNKTIIFKQSSGGDPEIVTHSFNCGGEFFYCNSTQLFNSTWFNSTWSTEGSNNTEGSDTITLPCRIKQFINMWQEVGKAMYAPPISGQIRCSSNITGLLLTRDGGNNNNGSEIFRPGGGDMRDNWRSELYKYKVVKIEPLGVAPTKAKRRVVQREKRAVGIGALFLGFLGAAGSTMGARSMTLTVQARQLLSGIVQQQNNLLRAIEAQQHLLQLTVWGIKQLQARILAVERRLKDQQLLGIWGCSGKLICTTAVPWNASWSNGSLEQIWNNMTWMEWDREINNYTSLIHSLIEESQNQQEKNEQELLELDKWASLWNWFNITNWLWYIKIFIMIVGGLVGLRIVFAVLSIVNRVRQGYSPLSFQTHLPTPRGPDRPEGIEEEGGERDRDRSIRLVNGSLALIWDDLRSLCLFSYHRLRDLLLIVTRIVELLGRRGWEALKYWWNLLQYWSQELKNSAVSLLNATAIAVAEGTDRVIEVVQGACRAIRHIPRRIRQGLERILL

SEQ ID NO: 287 - protein, 861 aa, Human immunodeficiency virus type 1
MRVKEKYQHLWRWGWKWGTMLLGILMICSATEKLWVTVYYGVPVWKEATTTLFCASDAKAYDTEVHNVWATHACVPTDPNPQEVVLVNVTENFNMWKNDMVEQMHEDIISLWDQSLKPCVKLTPLCVSLKCTDLGNATNTNSSNTNSSSGEMMMEKGEIKNCSFNISTSIRGKVQKEYAFFYKLDIIPIDNDTTSYTLTSCNTSVITQACPKVSFEPIPIHYCAPAGFAILKCNNKTFNGTGPCTNVSTVQCTHGIRPVVSTQLLLNGSLAEEEVVIRSANFTDNAKTIIVQLNQSVEINCTRPNNNTRKSIRIQRGPGRAFVTIGKIGNMRQAHCNISRAKWNATLKQIASKLREQFGNNKTIIFKQSSGGDPEIVTHSFNCGGEFFYCNSTQLFNSTWFNSTWSTEGSNNTEGSDTITLPCRIKQFINMWQEVGKAMYAPPISGQIRCSSNITGLLLTRDGGNNNNGSEIFRPGGGDMRDNWRSELYKYKVVKIEPLGVAPTKAKRRVVQREKRAVGIGALFLGFLGAAGSTMGARSMTLTVQARQLLSGIVQQQNNLLRAIEAQQHLLQLTVWGIKQLQARILAVERRLKDQQLLGIWGCSGKLICTTAVPWNASWSNSSLEQIWNNMTWMEWDREINNYTSLIHSLIEESQNQQEKNEQELLELDKWASLWNWFNITNWLWYIKIFIMIVGGLVGLRIVFAVLSIVNRVRQGYSPLSFQTHLPTPRGPDRPEGIEEEGGERDRDRSIRLVNGSLALIWDDLRSLCLFSYHRLRDLLLIVTRIVELLGRRGWEALKYWWNLLQYWSQELKNSAVSLLNATAIAVAEGTDRVIEVVQGACRAIRHIPRRIRQGLERILL

SEQ ID NO: 288 - protein, 861 aa, Human immunodeficiency virus type 1; identical to SEQ ID NO: 214

SEQ ID NO: 289 - protein, 861 aa, Human immunodeficiency virus type 1; identical to SEQ ID NO: 215

SEQ ID NO: 290 - protein, 861 aa, Human immunodeficiency virus type 1; identical to SEQ ID NO: 212

SEQ ID NO: 291 - protein, 861 aa, Human immunodeficiency virus type 1; identical to SEQ ID NO: 213

SEQ ID NO: 292 - protein, 861 aa, Human immunodeficiency virus type 1; identical to SEQ ID NO: 220

SEQ ID NO: 293 - protein, 881 aa, Simian immunodeficiency virus
  misc_feature (736)..(736): Xaa can be any naturally occurring amino acid
MGCLGNQLLIAILLLSVYGIYCTQYVTVFYGVPAWRNATIPLFCATKNRDTWGTTQCLPDNGDYSELALNVTESFDAWENTVTEQAIEDVWQLFETSIKPCVKLSPLCITMRCNKSETDRWGLTKSSTTITTAAPTSAPVSEKIDMVNETSSCIAQNNCTGLEQEQMISCKFTMTGLKRDKTKEYNETWYSTDLVCEQGNSTDNESRCYMNHCNTSVIQESCDKHYWDTIRFRYCAPPGYALLRCNDTNYSGFMPKCSKVVVSSCTRMMETQTSTWFGFNGTRAENRTYIYWHGRDNRTIISLNKYYNLTMKCRRPGNKTVLPVTIMSGLVFHSQPINDRPKQAWCWFGGKWKDAIKEVKQTIVKHPRYTGTNNTDKINLTAPGGGDPEVTFMWTNCRGEFLYCKMNWFLNWVEDRDVTTQRPKERHRRNYVPCHIRQIINTWHKVGKNVYLPPREGDLTCNSTVTSLIANIDWTDGNQTSITMSAEVAELYRLELGDYKLVEITPIGLAPTDVKRYTTGGTSRNKRGVFVLGFLGFLATAGSAMGAASLTLTAQSRTLLAGIVQQQQQLLDVVKRQQELLRLTVWGTKNLQTRVTAIEKYRKDQAQLNAWGCAFRQVCHTTVPWPNASLTPDWNNDTWQEWERKVDFLEENITALLEEAQIQQEKNMYELQKLNSWDVFGNWFDLASWIKYIQYGIYVVVGVILLRIVIYIVQMLAKLRQGYRPVFSSPPSYFQXTHTQQDPALPTREGKEGDGGEGGGNSSWPWQIEYIHFLIRQLIRLLTWLFSNCRTLLSRAYQILQPILQRLSATLRRVREVLRTELTYLQYGWSYFHEAVQAGWRSATETLAGAWRDLWETLRRGGRWILAIPRRIRQGLELTLL

SEQ ID NO: 294 - protein, 860 aa, Human immunodeficiency virus type 2
MEPGRNQLFVVILLTSACLVYCSQYVTVFYGIPAWKNASIPLFCATKNRDTWGTIQCLPDNDDYQEIILNVTEAFDAWNNTVTEQAVEDVWHLFETSIKPCVKLTPLCVAMNCSRVQGNTTTPNPRTSSSTTSRPPTSAASIINETSNCIENNTCAGLGYEEMMQCEFNMKGLEQDKKRRYKDTWYLEDVVCDNTTAGTCYMRHCNTSIIKESCDKHYWDAMRFRYCAPPGFALLRCNDTNYSGFEPKCTKVVAASCTRMMETQTSTWFGFNGTRAENRTYIYWHGRDNRTIISLNKYYNLTMRCKRPGNKTVLPITLMSGLVFHSQPINTRPRQAWCRFGGRWREAMQEVKQTLVQHPRYKGINDTGKINFTKPGAGSDPEVAFMWTNCRGEFLYCNMTWFLNWVEDKNQTRRNYCHIKQIINTWHKVGKNVYLPPREGELACESTVTSIIANIDIDKNRTHTNITFSAEVAELYRLELGDYKLIEITPIGFAPTDQRRYSSTPVRNKRGVFVLGFLGFLATAGSAMGARSLTLSAQSRTLLAGIVQQQQQLLDVVKRQQEMLRLTVWGTKNLQARVTAIEKYRKHQAQLNSWGCAFRQVCHTTVPWVNDSLSPDWKNMTWQEWEKQVRYLEANISQSLEEAQIQQEKNMYELQKLNSWDILGNWFDLTSWVKYIQYGVHIVVGIIALRIAIYVVQLLSRFRKGYRPVFSSPPGYLQQIHIHKDRGQPANEGTEEDVGGDSGYDLWPWPINYVQFLIHLLTRLLIGLYNICRDLLSKNSPTRRLISQSLTAIRDWLRLKAAQLQYGCEWIQEAFQAFARTTRETLAGAWGWLWEAARRIGRGILAVPRRIRQGAELALL

SEQ ID NO: 295 - DNA, 36 bp, Artificial sequence
  oligonucleotide for introducing mutation within the ISU of lentiviral ENV protein
acatggcccagccggcctctggtatagtgcagcagc

SEQ ID NO: 296 - DNA, 34 bp, Artificial sequence
  oligonucleotide for introducing mutation within the ISU of lentiviral ENV protein
gtatacgcgtttataattcttgttcattcttttc

SEQ ID NO: 297 - DNA, 35 bp, Artificial sequence
  oligonucleotide for introducing mutation within the ISU of lentiviral ENV protein
gtatacgcgtttacatgttattccaaatctgttcc

SEQ ID NO: 298 - DNA, 31 bp, Artificial sequence
  oligonucleotide for introducing mutation within the ISU of lentiviral ENV protein
gtatacgcgtttaagcattccaaggcacagc

SEQ ID NO: 299 - DNA, 33 bp, Artificial sequence
  oligonucleotide for introducing mutation within the ISU of lentiviral ENV protein
gtatacgcgtttatccagagcaaccccaaatcc

SEQ ID NO: 300 - DNA, 32 bp, Artificial sequence
  oligonucleotide for introducing mutation within the ISU of lentiviral ENV protein
gtatacgcgtttaccccaggagctgttgatcc

SEQ ID NO: 301 - DNA, 34 bp, Artificial sequence
  oligonucleotide for introducing mutation within the ISU of lentiviral ENV protein
gtatacgcgtttactttaggtatctttccacagc

SEQ ID NO: 302 - DNA, 34 bp, Artificial sequence
  oligonucleotide for introducing mutation within the ISU of lentiviral ENV protein
gtatacgcgtttaagccaggattcttgcctggag

SEQ ID NO: 303 - DNA, 31 bp, Artificial sequence
  oligonucleotide for introducing mutation within the ISU of lentiviral ENV protein
gtatacgcgtttactgcttgatgccccagac

SEQ ID NO: 304 - DNA, 26 bp, Artificial sequence
  oligonucleotide for introducing mutation within the ISU of lentiviral ENV protein
ctttccacagcccggattcttgcctg

SEQ ID NO: 305 - DNA, 26 bp, Artificial sequence
  oligonucleotide for introducing mutation within the ISU of lentiviral ENV protein
caggcaagaatccgggctgtggaaag

SEQ ID NO: 306 - DNA, 28 bp, Artificial sequence
  oligonucleotide for introducing mutation within the ISU of lentiviral ENV protein
gtatctttccacacgcaggattcttgcc

SEQ ID NO: 307 - DNA, 28 bp, Artificial sequence
  oligonucleotide for introducing mutation within the ISU of lentiviral ENV protein
ggcaagaatcctgcgtgtggaaagatac

SEQ ID NO: 308 - DNA, 34 bp, Artificial sequence
  oligonucleotide for introducing mutation within the ISU of lentiviral ENV protein
ctttaggtatctttccctagccaggattcttgcc

SEQ ID NO: 309 - DNA, 34 bp, Artificial sequence
  oligonucleotide for introducing mutation within the ISU of lentiviral ENV protein
ggcaagaatcctggctagggaaagatacctaaag

SEQ ID NO: 310 - DNA, 30 bp, Artificial sequence
  oligonucleotide for introducing mutation within the ISU of lentiviral ENV protein
cctttaggtatcttctcacagccaggattc

SEQ ID NO: 311 - DNA, 30 bp, Artificial sequence
  oligonucleotide for introducing mutation within the ISU of lentiviral ENV protein
gaatcctggctgtgagaagatacctaaagg

SEQ ID NO: 312 - DNA, 31 bp, Artificial sequence
  oligonucleotide for introducing mutation within the ISU of lentiviral ENV protein
gttgatcctttaggcgtctttccacagccag

SEQ ID NO: 313 - DNA, 31 bp, Artificial sequence
  oligonucleotide for introducing mutation within the ISU of lentiviral ENV protein
ctggctgtggaaagacgcctaaaggatcaac

SEQ ID NO: 314 - DNA, 35 bp, Artificial sequence
  oligonucleotide for introducing mutation within the ISU of lentiviral ENV protein
ggagctgttgatcctttcggtatctttccacagcc

SEQ ID NO: 315 - DNA, 35 bp, Artificial sequence
  oligonucleotide for introducing mutation within the ISU of lentiviral ENV protein
ggctgtggaaagataccgaaaggatcaacagctcc

SEQ ID NO: 316 - DNA, 30 bp, Artificial sequence
  oligonucleotide for introducing mutation within the ISU of lentiviral ENV protein
gagctgttgatcccttaggtatctttccac

SEQ ID NO: 317 - DNA, 30 bp, Artificial sequence
  oligonucleotide for introducing mutation within the ISU of lentiviral ENV protein
gtggaaagatacctaagggatcaacagctc

SEQ ID NO: 318 - DNA, 28 bp, Artificial sequence
  oligonucleotide for introducing mutation within the ISU of lentiviral ENV protein
aggagctgttgacgctttaggtatcttt

SEQ ID NO: 319 - DNA, 28 bp, Artificial sequence
  oligonucleotide for introducing mutation within the ISU of lentiviral ENV protein
aaagatacctaaagcgtcaacagctcct

SEQ ID NO: 320 - DNA, 28 bp, Artificial sequence
  oligonucleotide for introducing mutation within the ISU of lentiviral ENV protein
cccaggagctgtcgatcctttaggtatc

SEQ ID NO: 321 - DNA, 28 bp, Artificial sequence
  oligonucleotide for introducing mutation within the ISU of lentiviral ENV protein
gatacctaaaggatcgacagctcctggg

SEQ ID NO: 322 - DNA, 29 bp, Artificial sequence
  oligonucleotide for introducing mutation within the ISU of lentiviral ENV protein
caaatccccaggagccgttgatcctttag

SEQ ID NO: 323 - DNA, 29 bp, Artificial sequence
  oligonucleotide for introducing mutation within the ISU of lentiviral ENV protein
ctaaaggatcaacggctcctggggatttg

SEQ ID NO: 324 - DNA, 29 bp, Artificial sequence
  oligonucleotide for introducing mutation within the ISU of lentiviral ENV protein
caaatccccaggcgctgttgatcctttag

SEQ ID NO: 325 - DNA, 29 bp, Artificial sequence
  oligonucleotide for introducing mutation within the ISU of lentiviral ENV protein
ctaaaggatcaacagcgcctggggatttg

SEQ ID NO: 326 - DNA, 22 bp, Artificial sequence
  oligonucleotide for introducing mutation within the ISU of lentiviral ENV protein
cccaaatcccccggagctgttg

SEQ ID NO: 327 - DNA, 22 bp, Artificial sequence
  oligonucleotide for introducing mutation within the ISU of lentiviral ENV protein
caacagctccgggggatttggg

SEQ ID NO: 328 - DNA, 23 bp, Artificial sequence
  oligonucleotide for introducing mutation within the ISU of lentiviral ENV protein
ccccaaatccgcaggagctgttg

SEQ ID NO: 329 - DNA, 23 bp, Artificial sequence
  oligonucleotide for introducing mutation within the ISU of lentiviral ENV protein
caacagctcctgcggatttgggg

SEQ ID NO: 330 - DNA, 24 bp, Artificial sequence
  oligonucleotide for introducing mutation within the ISU of lentiviral ENV protein
gcaaccccatctccccaggagctg

SEQ ID NO: 331 - DNA, 24 bp, Artificial sequence
  oligonucleotide for introducing mutation within the ISU of lentiviral ENV protein
cagctcctggggagatggggttgc

SEQ ID NO: 332 - DNA, 24 bp, Artificial sequence
  oligonucleotide for introducing mutation within the ISU of lentiviral ENV protein
gcaaccccatctccccaggagctg

SEQ ID NO: 333 - DNA, 24 bp, Artificial sequence
  oligonucleotide for introducing mutation within the ISU of lentiviral ENV protein
cagctcctggggagatggggttgc

SEQ ID NO: 334 - DNA, 31 bp, Artificial sequence
  oligonucleotide for introducing mutation within the ISU of lentiviral ENV protein
gttgatcctttagttttctttccacagccag

SEQ ID NO: 335 - DNA, 31 bp, Artificial sequence
  oligonucleotide for introducing mutation within the ISU of lentiviral ENV protein
ctggctgtggaaagaaaactaaaggatcaac

SEQ ID NO: 336 - DNA, 31 bp, Artificial sequence
  oligonucleotide for introducing mutation within the ISU of lentiviral ENV protein
gttgatcctttaggtgtctttccacagccag

SEQ ID NO: 337 - DNA, 31 bp, Artificial sequence
  oligonucleotide for introducing mutation within the ISU of lentiviral ENV protein
ctggctgtggaaagacacctaaaggatcaac

SEQ ID NO: 338 - DNA, 31 bp, Artificial sequence
  oligonucleotide for introducing mutation within the ISU of lentiviral ENV protein
gttgatcctttagggctctttccacagccag

SEQ ID NO: 339 - DNA, 31 bp, Artificial sequence
  oligonucleotide for introducing mutation within the ISU of lentiviral ENV protein
ctggctgtggaaagagccctaaaggatcaac

SEQ ID NO: 340 - DNA, 31 bp, Artificial sequence
  oligonucleotide for introducing mutation within the ISU of lentiviral ENV protein
gttgatcctttaggcctctttccacagccag

SEQ ID NO: 341 - DNA, 31 bp, Artificial sequence
  oligonucleotide for introducing mutation within the ISU of lentiviral ENV protein
ctggctgtggaaagaggcctaaaggatcaac

SEQ ID NO: 342 - DNA, 31 bp, Artificial sequence
  oligonucleotide for introducing mutation within the ISU of lentiviral ENV protein
gttgatcctttaggaatctttccacagccag

SEQ ID NO: 343 - DNA, 31 bp, Artificial sequence
  oligonucleotide for introducing mutation within the ISU of lentiviral ENV protein
ctggctgtggaaagattcctaaaggatcaac

SEQ ID NO: 344 - DNA, 31 bp, Artificial sequence
  oligonucleotide for introducing mutation within the ISU of lentiviral ENV protein
gttgatcctttaggagtctttccacagccag

SEQ ID NO: 345 - DNA, 31 bp, Artificial sequence
  oligonucleotide for introducing mutation within the ISU of lentiviral ENV protein
ctggctgtggaaagactcctaaaggatcaac

SEQ ID NO: 346 - DNA, 31 bp, Artificial sequence
  oligonucleotide for introducing mutation within the ISU of lentiviral ENV protein
acaaattagatgttcatcaaatattacaggg

SEQ ID NO: 347 - DNA, 44 bp, Artificial sequence
  oligonucleotide for introducing mutation within the ISU of lentiviral ENV protein
gcaacagatgctgttgggcctcaatggccctcagcaaattgttc

SEQ ID NO: 348 - DNA, 44 bp, Artificial sequence
  oligonucleotide for introducing mutation within the ISU of lentiviral ENV protein
gaacaatttgctgagggccattgaggcccaacagcatctgttgc

SEQ ID NO: 349 - DNA, 32 bp, Artificial sequence
  oligonucleotide for introducing mutation within the ISU of lentiviral ENV protein
gtgtattaagcttgtgtaattgttaatttctc

SEQ ID NO: 350 - DNA, 25 bp, Artificial sequence
  oligonucleotide for introducing mutation within the ISU of lentiviral ENV protein
ccgctcagtcccgaactttattggc

SEQ ID NO: 351 - DNA, 22 bp, Artificial sequence
  oligonucleotide for introducing mutation within the ISU of lentiviral ENV protein
ggtggggaagagaacactggcc

SEQ ID NO: 352 - DNA, 45 bp, Artificial sequence
  oligonucleotide for introducing mutation within the ISU of lentiviral ENV protein
cagactagggtcactgccatccgcaagtacttaaaggaccaggcg

SEQ ID NO: 353 - DNA, 45 bp, Artificial sequence
  oligonucleotide for introducing mutation within the ISU of lentiviral ENV protein
cgcctggtcctttaagtacttgcggatggcagtgaccctagtctg

SEQ ID NO: 354 - DNA, 45 bp, Artificial sequence
  oligonucleotide for introducing mutation within the ISU of lentiviral ENV protein
actagggtcactgccatcgagcgctacttaaaggaccaggcgcag

SEQ ID NO: 355 - DNA, 45 bp, Artificial sequence
  oligonucleotide for introducing mutation within the ISU of lentiviral ENV protein
ctgcgcctggtcctttaagtagcgctcgatggcagtgaccctagt

SEQ ID NO: 356 - DNA, 30 bp, Artificial sequence
  oligonucleotide for introducing mutation within the ISU of lentiviral ENV protein
gccatcgagaagcgcttaaaggaccaggcg

SEQ ID NO: 357 - DNA, 30 bp, Artificial sequence
  oligonucleotide for introducing mutation within the ISU of lentiviral ENV protein
cgcctggtcctttaagcgcttctcgatggc

SEQ ID NO: 358 - DNA, 42 bp, Artificial sequence
  oligonucleotide for introducing mutation within the ISU of lentiviral ENV protein
gtcactgccatcgagaagtaccgcaaggaccaggcgcagctg

SEQ ID NO: 359 - DNA, 42 bp, Artificial sequence
  oligonucleotide for introducing mutation within the ISU of lentiviral ENV protein
cagctgcgcctggtccttgcggtacttctcgatggcagtgac

SEQ ID NO: 360 - DNA, 45 bp, Artificial sequence
  oligonucleotide for introducing mutation within the ISU of lentiviral ENV protein
gccatcgagaagtacttacgcgaccaggcgcagctgaatgcttgg

SEQ ID NO: 361 - DNA, 45 bp, Artificial sequence
  oligonucleotide for introducing mutation within the ISU of lentiviral ENV protein
ccaagcattcagctgcgcctggtcgcgtaagtacttctcgatggc

SEQ ID NO: 362 - DNA, 39 bp, Artificial sequence
  oligonucleotide for introducing mutation within the ISU of lentiviral ENV protein
gagaagtacttaaagcgccaggcgcagctgaatgcttgg

SEQ ID NO: 363 - DNA, 39 bp, Artificial sequence
  oligonucleotide for introducing mutation within the ISU of lentiviral ENV protein
attcagctgcgcctggcgctttaagtacttctcgatggc

SEQ ID NO: 364 - DNA, 36 bp, Artificial sequence
  oligonucleotide for introducing mutation within the ISU of lentiviral ENV protein
acatggcccagccggccgctgggatagtgcagcaac

SEQ ID NO: 365 - DNA, 35 bp, Artificial sequence
  oligonucleotide for introducing mutation within the ISU of lentiviral ENV protein
gtatacgcgtttaaaacgcacatccccaagcattc

SEQ ID NO: 366 - protein, 49 aa, Artificial sequence
  derived from the ISU domain of HIV1
SGIVQQQNNLLRAIEAQQHLLQLTVWGIKQLQARILAVERYLKDQQLLG

SEQ ID NO: 367 - protein, 49 aa, Artificial sequence
  derived from the ISU domain of HIV1
SGIVQQQNNLLRAIEAQQHLLKLTVWGIKQLQARILAVERYLKDQQLLG

SEQ ID NO: 368 - protein, 49 aa, Artificial sequence
  derived from the ISU domain of HIV1
SGIVQQQNNLLRAIEAQQHLLQLTVWGIKQLQARVLAVERYLKDQQLLG

SEQ ID NO: 369 - protein, 49 aa, Artificial sequence; identical to SEQ ID NO: 366
  derived from the ISU domain of HIV1

SEQ ID NO: 370 - protein, 49 aa, Artificial sequence
  derived from the ISU domain of HIV1
SGIVQQQNNLLRAIEAQQQMLQLTVWGIKQLRARVLAVERYLRDQQLLG

SEQ ID NO: 371 - protein, 49 aa, Artificial Sequence
  derived from the ISU domain of HIV1
SGIVQQQSNLLRAIQARQHMLQLTVWGIKQLQARVLAVERYLRDQQLLG

SEQ ID NO: 372 - protein, 49 aa, Artificial sequence
  derived from the ISU domain of SIV
SGIVQQQNNLLKAIEAQQHLLQLSIWGVKQLQARLLAVERYLQDQQILG

SEQ ID NO: 373 - protein, 49 aa, Artificial sequence
  derived from the ISU domain of SIV
SGIVQQQNNLLRAIEAQQHLLQLSVWGIKQLQARVLAIERYLRDQQILG

SEQ ID NO: 374 - protein, 49 aa, Artificial sequence
  derived from the ISU domain of SIV
AGIVQQQQQLLDVVKRQQELLRLTVWGTKNLQTRVSAIEKYLKDQAQLN

SEQ ID NO: 375 - protein, 49 aa, Artificial Sequence
  derived from the ISU domain of SIV
AGIVQQQQQLLDVVKRQQELLRLTVWGTKNLQTRVTAIEKYLKDQAQLN

SEQ ID NO: 376 - protein, 49 aa, Artificial sequence
  derived from the ISU domain of HIV2
AGIVQQQQQLLDVVKRQQEMLRLTVWGTKNLQARVTAIEKYLKDQAQLN

SEQ ID NO: 377 - protein, 49 aa, Artificial Sequence
  derived from the ISU domain of HIV2
AGIVQQQQQLLDVVKRQQELLRLTVWGTKNLQTRVTAIEKYLKDQALLN

SEQ ID NO: 378 - DNA, 31 bp, Artificial sequence
  Oligonucleotide used for introducing a second mutation
ctggctgtggaagcacgcctaaaggatcaac

SEQ ID NO: 379 - DNA, 31 bp, Artificial sequence
  Oligonucleotide used for introducing a second mutation
gttgatcctttaggcgtgcttccacagccag

SEQ ID NO: 380 - DNA, 31 bp, Artificial sequence
  Oligonucleotide used for introducing a second mutation
ctggctgtggaagaacgcctaaaggatcaac

SEQ ID NO: 381 - DNA, 31 bp, Artificial sequence
  Oligonucleotide used for introducing a second mutation
gttgatcctttaggcgttcttccacagccag

SEQ ID NO: 382 - DNA, 31 bp, Artificial sequence
  Oligonucleotide used for introducing a second mutation
ctggctgtggaagctgccctaaaggatcaac

SEQ ID NO: 383 - DNA, 31 bp, Artificial sequence
  Oligonucleotide used for introducing a second mutation
gttgatcctttagggcagcttccacagccag

SEQ ID NO: 384 - DNA, 31 bp, Artificial sequence
  Oligonucleotide used for introducing a second mutation
ctggctgtggaagaagccctaaaggatcaac

SEQ ID NO: 385 - DNA, 31 bp, Artificial sequence
  Oligonucleotide used for introducing a second mutation
gttgatcctttagggcttcttccacagccag

SEQ ID NO: 386 - DNA, 31 bp, Artificial sequence
  Oligonucleotide used for introducing a second mutation
ctggctgtggaaagcgccctaaaggatcaac

SEQ ID NO: 387 - DNA, 31 bp, Artificial sequence
  Oligonucleotide used for introducing a second mutation
gttgatcctttagggcgctttccacagccag

SEQ ID NO: 388 - DNA, 31 bp, Artificial sequence
  Oligonucleotide used for introducing a second mutation
ctggctgtggaaacagccctaaaggatcaac

SEQ ID NO: 389 - DNA, 31 bp, Artificial sequence
  Oligonucleotide used for introducing a second mutation
gttgatcctttagggctgtttccacagccag

SEQ ID NO: 390 - DNA, 31 bp, Artificial sequence
  Oligonucleotide used for introducing a second mutation
ctggctgtggaagcttacctaaaggatcaac

SEQ ID NO: 391 - DNA, 31 bp, Artificial sequence
  Oligonucleotide used for introducing a second mutation
gttgatcctttaggtaagcttccacagccag

SEQ ID NO: 392 - DNA, 31 bp, Artificial sequence
  Oligonucleotide used for introducing a second mutation
ctggctgtggaagaatacctaaaggatcaac

SEQ ID NO: 393 - DNA, 31 bp, Artificial sequence
  Oligonucleotide used for introducing a second mutation
gttgatcctttaggtattcttccacagccag

SEQ ID NO: 394 - DNA, 31 bp, Artificial sequence
  Oligonucleotide used for introducing a second mutation
ctggctgtggaaagctacctaaaggatcaac

SEQ ID NO: 395 - DNA, 31 bp, Artificial sequence
  Oligonucleotide used for introducing a second mutation
gttgatcctttaggtagctttccacagccag

SEQ ID NO: 396 - DNA, 31 bp, Artificial sequence
  Oligonucleotide used for introducing a second mutation
ctggctgtggaaacatacctaaaggatcaac

SEQ ID NO: 397 - DNA, 31 bp, Artificial sequence
  Oligonucleotide used for introducing a second mutation
gttgatcctttaggtatgtttccacagccag

SEQ ID NO: 398 - DNA, 36 bp, Artificial sequence
  Oligonucleotide used for introducing a second mutation
gctagttggagtaatgcatctctggaacagatttgg

SEQ ID NO: 399 - DNA, 36 bp, Artificial sequence
  Oligonucleotide used for introducing a second mutation
ccaaatctgttccagagatgcattactccaactagc

SEQ ID NO: 400 - DNA, 36 bp, Artificial sequence
  Oligonucleotide used for introducing a second mutation
gctagttggagtaatggatctctggaacagatttgg

SEQ ID NO: 401 - DNA, 36 bp, Artificial sequence
  Oligonucleotide used for introducing a second mutation
ccaaatctgttccagagatccattactccaactagc

SEQ ID NO: 402 - DNA, 36 bp, Artificial sequence
  Oligonucleotide used for introducing a second mutation
gctagttggagtaattcatctctggaacagatttgg

SEQ ID NO: 403 - DNA, 36 bp, Artificial Sequence
  Oligonucleotide used for introducing a second mutation
ccaaatctgttccagagatgaattactccaactagc

SEQ ID NO: 404 - DNA, 54 bp, Artificial Sequence
  oligonucleotide for introducing mutation within the ISU of lentiviral ENV protein
  misc_feature (1)..(5): n is a, c, g, or t
nnnnnctcgagaccggtccaactagaaccatgagagtgaaggagaaatatcagc

SEQ ID NO: 405 - DNA, 31 bp, Artificial Sequence
  oligonucleotide for introducing mutation within the ISU of lentiviral ENV protein
  misc_feature (1)..(5): n is a, c, g, or t
nnnnnacgcgttcaatatccctgcctaactc

SEQ ID NO: 406 - DNA, 34 bp, Artificial Sequence
  oligonucleotide for introducing mutation within the ISU of lentiviral ENV protein
  misc_feature (1)..(5): n is a, c, g, or t
nnnnnacgcgtttatagcaaaatcctttccaagc

SEQ ID NO: 407 - protein, 8 aa, Artificial sequence
  fragment of lentiviral ENV ISU
AVEAALKD

SEQ ID NO: 408 - protein, 8 aa, Artificial sequence
  fragment of lentiviral ENV ISU
AVEEALKD

SEQ ID NO: 409 - protein, 8 aa, Artificial sequence
  fragment of lentiviral ENV ISU
AVESALKD

SEQ ID NO: 410 - protein, 8 aa, Artificial sequence
  fragment of lentiviral ENV ISU
AVETALKD

SEQ ID NO: 411 - protein, 8 aa, Artificial sequence
  fragment of lentiviral ENV ISU
AIEAALKD

SEQ ID NO: 412 - protein, 8 aa, Artificial sequence
  fragment of lentiviral ENV ISU
AIEEALKD

SEQ ID NO: 413 - protein, 8 aa, Artificial sequence
  fragment of lentiviral ENV ISU
AIESALKD

SEQ ID NO: 414 - protein, 8 aa, Artificial sequence
  fragment of lentiviral ENV ISU
AIETALKD

SEQ ID NO: 415 - protein, 38 aa, Artificial Sequence
  derived from lentiviral ENV protein
  MISC_FEATURE (2)..(2): Xaa = I or V
  MISC_FEATURE (4)..(4): Xaa = K or R
  misc_feature (7)..(7): Xaa can be any naturally occurring amino acid
  misc_feature (10)..(11): Xaa can be any naturally occurring amino acid
  misc_feature (13)..(14): Xaa can be any naturally occurring amino acid
  MISC_FEATURE (18)..(18): Xaa = A or S
  MISC_FEATURE (19)..(19): Xaa = F or G
  misc_feature (20)..(21): Xaa can be any naturally occurring amino acid
  misc_feature (24)..(24): Xaa can be any naturally occurring amino acid
  misc_feature (26)..(26): Xaa can be any naturally occurring amino acid
  misc_feature (30)..(30): Xaa can be any naturally occurring amino acid
  MISC_FEATURE (31)..(35): Xaa = no or any amino acid
  MISC_FEATURE (36)..(36): Xaa = N or S
  MISC_FEATURE (37)..(37): Xaa = E, D, N or A
  MISC_FEATURE (38)..(38): Xaa = S or T
AXEXYLXDQXXLXXWGCXXXXCVXTXVPWXXXXXXXXX

SEQ ID NO: 416 - protein, 9 aa, Artificial sequence
  fragment of lentiviral ENV ISU
  MISC_FEATURE (2)..(2): Xaa = I or V
  MISC_FEATURE (4)..(4): Xaa = K or R
  MISC_FEATURE (5)..(5): Xaa is any naturally occuring amino acid or is mutated
  MISC_FEATURE (6)..(6): Xaa is any naturally occuring amino acid or is mutated
  MISC_FEATURE (7)..(7): Xaa can be any naturally occuring amino acid
AXEXXXXDQ

SEQ ID NO: 417 - protein, 861 aa, Human immunodeficiency virus type 1
MRVKEKYQHLWRWGWKWGTMLLGILMICSATEKLWVTVYYGVPVWKEATTTLFCASDAKAYDTEVHNVWATHACVPTDPNPQEVVLVNVTENFNMWKNDMVEQMHEDIISLWDQSLKPCVKLTPLCVSLKCTDLGNATNTNSSNTNSSSGEMMMEKGEIKNCSFNISTSIRGKVQKEYAFFYKLDIIPIDNDTTSYTLTSCNTSVITQACPKVSFEPIPIHYCAPAGFAILKCNNKTFNGTGPCTNVSTVQCTHGIRPVVSTQLLLNGSLAEEEVVIRSANFTDNAKTIIVQLNQSVEINCTRPNNNTRKSIRIQRGPGRAFVTIGKIGNMRQAHCNISRAKWNATLKQIASKLREQFGNNKTIIFKQSSGGDPEIVTHSFNCGGEFFYCNSTQLFNSTWFNSTWSTEGSNNTEGSDTITLPCRIKQFINMWQEVGKAMYAPPISGQIRCSSNITGLLLTRDGGNNNNGSEIFRPGGGDMRDNWRSELYKYKVVKIEPLGVAPTKAKRRVVQREKRAVGIGALFLGFLGAAGSTMGARSMTLTVQARQLLSGIVQQQNNLLRAIEAQQHLLQLTVWGIKQLQARILAVERYLKDQQLLGIWGCSGKLICTTAVPWNASWSNKSLEQIWNNMTWMEWDREINNYTSLIHSLIEESQNQQEKNEQELLELDKWASLWNWFNITNWLWYIKIFIMIVGGLVGLRIVFAVLSIVNRVRQGYSPLSFQTHLPTPRGPDRPEGIEEEGGERDRDRSIRLVNGSLALIWDDLRSLCLFSYHRLRDLLLIVTRIVELLGRRGWEALKYWWNLLQYWSQELKNSAVSLLNATAIAVAEGTDRVIEVVQGACRAIRHIPRRIRQGLERILL

SEQ ID NO: 418 - protein, 859 aa, Human immunodeficiency virus type 2
MCGRNQLFVASLLASACLIYCVQYVTVFYGVPVWRNASIPLFCATKNRDTWGTIQCLPDNDDYQEIALNVTEAFDAWNNTVTEQAVEDVWSLFETSIKPCVKLTPLCVAMRCNSTTAKNTTSTPTTTTTANTTIGENSSCIRTDNCTGLGEEEMVDCQFNMTGLERDKKKLYNETWYSKDVVCESNDTKKEKTCYMNHCNTSVITESCDKHYWDTMRFRYCAPPGFALLRCNDTNYSGFEPNCSKVVAATCTRMMETQTSTWFGFNGTRAENRTYIYWHGRDNRTIISLNKFYNLTVHCKRPGNKTVVPITLMSGLVFHSQPINRRPRQAWCWFKGEWKEAMKEVKLTLAKHPRYKGTNDTEKIRFIAPGERSDPEVAYMWTNCRGEFLYCNMTWFLNWVENRTNQTQHNYVPCHIKQIINTWHKVGKNVYLPPREGQLTCNSTVTSIIANIDGGENQTNITFSAEVAELYRLELGDYKLIEVTPIGFAPTPVKRYSSAPVRNKRGVFVLGFLGFLTTAGAAMGAASLTLSAQSRTLLAGIVQQQQQLLDVVKRQQEMLRLTVWGTKNLQARVTAIEKYLKDQAQLNSWGCAFRQVCHTTVPWVNDTLTPDWNNMTWQEWEQRIRNLEANISESLEQAQIQQEKNMYELQKLNSWDVFGNWFDLTSWIKYIQYGVYIVVGIIVLRIVIYVVQMLSRLRKGYRPVFSSPPAYFQQIHIHKDREQPAREETEEDVGNSVGDNWWPWPIRYIHFLIRQLIRLLNRLYNICRDLLSRSFQTLQLISQSLRRALTAVRDWLRFNTAYLQYGGEWIQEAFRAFARATGETLTNAWRGFWGTLGQIGRGILAVPRRIRQGAEIALL

SEQ ID NO: 419 - protein, 879 aa, Simian immunodeficiency virus
MGCLGNQLLIAILLLSVYGIYCTLYVTVFYGVPAWRNATIPLFCATKNRDTWGTTQCLPDNGDYSEVALNVTESFDAWNNTVTEQAIEDVWQLFETSIKPCVKLSPLCITMRCNKSETDRWGLTKSITTTASTTSTTASAKVDMVNETSSCIAQDNCTGLEQEQMISCKFNMTGLKRDKKKEYNETWYSADLVCEQGNNTGNESRCYMNHCNTSVIQESCDKHYWDAIRFRYCAPPGYALLRCNDTNYSGFMPKCSKVVVSSCTRMMETQTSTWFGFNGTRAENRTYIYWHGRDNRTIISLNKYYNLTMKCRRPGNKTVLPVTIMSGLVFHSQPINDRPKQAWCWFGGKWKDAIKEVKQTIVKHPRYTGTNNTDKINLTAPGGGDPEVTFMWTNCRGEFLYCKMNWFLNWVEDRNTANQKPKEQHKRNYVPCHIRQIINTWHKVGKNVYLPPREGDLTCNSTVTSLIANIDWIDGNQTNITMSAEVAELYRLELGDYKLVEITPIGLAPTDVKRYTTGGTSRNKRGVFVLGFLGFLATAGSAMGAASLTLTAQSRTLLAGIVQQQQQLLDVVKRQQELLRLTVWGTKNLQTRVTAIEKYLKDQAQLNAWGCAFRQVCHTTVPWPNASLTPKWNNETWQEWERKVDFLEENITALLEEAQIQQEKNMYELQKLNSWDVFGNWFDLASWIKYIQYGVYIVVGVILLRIVIYIVQMLAKLRQGYRPVFSSPPSYFQQTHIQQDPALPTREGKERDGGEGGGNSSWPWQIEYIHFLIRQLIRLLTWLFSNCRTLLSRVYQILQPILQRLSATLQRIREVLRTELTYLQYGWSYFHEAVQAVWRSATETLAGAWGDLWETLRRGGRWILAIPRRIRQGLELTLL

SEQ ID NO: 420 - protein, 859 aa, Human immunodeficiency virus type 2
MCGRNQLFVASLLASACLIYCVQYVTVFYGVPVWRNASIPLFCATKNRDTWGTIQCLPDNDDYQEIALNVTEAFDAWNNTVTEQAVEDVWSLFETSIKPCVKLTPLCVAMRCNSTTAKNTTSTPTTTTTANTTIGENSSCIRTDNCTGLGEEEMVDCQFNMTGLERDKKKLYNETWYSKDVVCESNDTKKEKTCYMNHCNTSVITESCDKHYWDTMRFRYCAPPGFALLRCNDTNYSGFEPNCSKVVAATCTRMMETQTSTWFGFNGTRAENRTYIYWHGRDNRTIISLNKFYNLTVHCKRPGNKTVVPITLMSGLVFHSQPINRRPRQAWCWFKGEWKEAMKEVKLTLAKHPRYKGTNDTEKIRFIAPGERSDPEVAYMWTNCRGEFLYCNMTWFLNWVENRTNQTQHNYVPCHIKQIINTWHKVGKNVYLPPREGQLTCNSTVTSIIANIDGGENQTNITFSAEVAELYRLELGDYKLIEVTPIGFAPTPVKRYSSAPVRNKRGVFVLGFLGFLTTAGAAMGAASLTLSAQSRTLLAGIVQQQQQLLDVVKRQQEMLRLTVWGTKNLQARVTAIEKRLKDQAQLNSWGCAFRQVCHTTVPWVNDTLTPDWNNMTWQEWEQRIRNLEANISESLEQAQIQQEKNMYELQKLNSWDVFGNWFDLTSWIKYIQYGVYIVVGIIVLRIVIYVVQMLSRLRKGYRPVFSSPPAYFQQIHIHKDREQPAREETEEDVGNSVGDNWWPWPIRYIHFLIRQLIRLLNRLYNICRDLLSRSFQTLQLISQSLRRALTAVRDWLRFNTAYLQYGGEWIQEAFRAFARATGETLTNAWRGFWGTLGQIGRGILAVPRRIRQGAEIALL

SEQ ID NO: 421 - protein, 879 aa, Simian immunodeficiency virus
MGCLGNQLLIAILLLSVYGIYCTLYVTVFYGVPAWRNATIPLFCATKNRDTWGTTQCLPDNGDYSEVALNVTESFDAWNNTVTEQAIEDVWQLFETSIKPCVKLSPLCITMRCNKSETDRWGLTKSITTTASTTSTTASAKVDMVNETSSCIAQDNCTGLEQEQMISCKFNMTGLKRDKKKEYNETWYSADLVCEQGNNTGNESRCYMNHCNTSVIQESCDKHYWDAIRFRYCAPPGYALLRCNDTNYSGFMPKCSKVVVSSCTRMMETQTSTWFGFNGTRAENRTYIYWHGRDNRTIISLNKYYNLTMKCRRPGNKTVLPVTIMSGLVFHSQPINDRPKQAWCWFGGKWKDAIKEVKQTIVKHPRYTGTNNTDKINLTAPGGGDPEVTFMWTNCRGEFLYCKMNWFLNWVEDRNTANQKPKEQHKRNYVPCHIRQIINTWHKVGKNVYLPPREGDLTCNSTVTSLIANIDWIDGNQTNITMSAEVAELYRLELGDYKLVEITPIGLAPTDVKRYTTGGTSRNKRGVFVLGFLGFLATAGSAMGAASLTLTAQSRTLLAGIVQQQQQLLDVVKRQQELLRLTVWGTKNLQTRVTAIEKRLKDQAQLNAWGCAFRQVCHTTVPWPNASLTPKWNNETWQEWERKVDFLEENITALLEEAQIQQEKNMYELQKLNSWDVFGNWFDLASWIKYIQYGVYIVVGVILLRIVIYIVQMLAKLRQGYRPVFSSPPSYFQQTHIQQDPALPTREGKERDGGEGGGNSSWPWQIEYIHFLIRQLIRLLTWLFSNCRTLLSRVYQILQPILQRLSATLQRIREVLRTELTYLQYGWSYFHEAVQAVWRSATETLAGAWGDLWETLRRGGRWILAIPRRIRQGLELTLL

SEQ ID NO: 422 - protein, 9 aa, Artificial sequence
  fragment of lentiviral ENV ISU
  MISC_FEATURE (5)..(5): Xaa is any naturally occuring amino acid or is mutated
  MISC_FEATURE (6)..(6): Xaa is any naturally occuring amino acid or is mutated
  MISC_FEATURE (7)..(7): Xaa can be any naturally occuring amino acid
AIEKXXXDQ

SEQ ID NO: 423 - protein, 9 aa, Artificial sequence
  fragment of lentiviral ENV ISU
  MISC_FEATURE (5)..(5): Xaa is any naturally occuring amino acid or is mutated
  MISC_FEATURE (6)..(6): Xaa is any naturally occuring amino acid or is mutated
  MISC_FEATURE (7)..(7): Xaa can be any naturally occuring amino acid
AIERXXXDQ

SEQ ID NO: 424 - protein, 9 aa, Artificial sequence
  fragment of lentiviral ENV ISU
  MISC_FEATURE (5)..(5): Xaa is any naturally occuring amino acid or is mutated
  MISC_FEATURE (6)..(6): Xaa is any naturally occuring amino acid or is mutated
  MISC_FEATURE (7)..(7): Xaa can be any naturally occuring amino acid
AVEKXXXDQ

SEQ ID NO: 425 - protein, 9 aa, Artificial sequence
  fragment of lentiviral ENV ISU
  MISC_FEATURE (5)..(5): Xaa is any naturally occuring amino acid or is mutated
  MISC_FEATURE (6)..(6): Xaa is any naturally occuring amino acid or is mutated
  MISC_FEATURE (7)..(7): Xaa can be any naturally occuring amino acid
AVERXXXDQ

SEQ ID NO: 426 - protein, 38 aa, Artificial sequence
  fragment of lentiviral ENV ISU
  MISC_FEATURE (2)..(2): Xaa = I or V
  MISC_FEATURE (4)..(4): Xaa = K or R
  MISC_FEATURE (5)..(5): Xaa is any naturally occuring amino acid or is mutated
  MISC_FEATURE (6)..(6): Xaa is any naturally occuring amino acid or is mutated
  MISC_FEATURE (7)..(7): Xaa can be any naturally occuring amino acid
  MISC_FEATURE (10)..(10): Xaa can be any naturally occuring amino acid
  MISC_FEATURE (11)..(11): Xaa can be any naturally occuring amino acid
  MISC_FEATURE (13)..(13): Xaa can be any naturally occuring amino acid
  MISC_FEATURE (14)..(14): Xaa can be any naturally occuring amino acid
  MISC_FEATURE (18)..(18): Xaa = A or S
  MISC_FEATURE (19)..(19): Xaa = F or G
  MISC_FEATURE (20)..(20): Xaa can be any naturally occuring amino acid
  MISC_FEATURE (21)..(21): Xaa can be any naturally occuring amino acid
  MISC_FEATURE (24)..(24): Xaa can be any naturally occuring amino acid
  MISC_FEATURE (26)..(26): Xaa can be any naturally occuring amino acid
  MISC_FEATURE (29)..(29): Xaa is any naturally occuring amino acid or is mutated
  MISC_FEATURE (30)..(30): Xaa can be naturally occuring amino acid
  MISC_FEATURE (31)..(35): Xaa can be any naturally occuring amino acid
  MISC_FEATURE (36)..(36): Xaa is any naturally occuring amino acid or is mutated
  MISC_FEATURE (37)..(37): Xaa is any naturally occuring amino acid or is mutated
  MISC_FEATURE (38)..(38): Xaa = S or T
AXEXXXXDQXXLXXWGCXXXXCVXTXVPXXXXXXXXXX

SEQ ID NO: 427 - protein, 9 aa, Artificial sequence
  fragment of lentiviral ENV ISU
  MISC_FEATURE (2)..(2): Xaa = I or V
  MISC_FEATURE (4)..(4): Xaa = K or R
  MISC_FEATURE (5)..(5): Xaa is any naturally occuring amino acid
  MISC_FEATURE (6)..(6): Xaa is any naturally occuring amino acid
  MISC_FEATURE (7)..(7): Xaa can be any naturally occuring amino acid
AXEXXXXDQ

SEQ ID NO: 428 - protein, 15 aa, Artificial sequence
  fragment of lentiviral ENV ISU
  MISC_FEATURE (1)..(1): Xaa is any naturally occuring amino acid or is mutated
  MISC_FEATURE (2)..(2): Xaa is any naturally occuring amino acid or is mutated
  MISC_FEATURE (3)..(3): Xaa is any naturally occuring amino acid or is mutated
  MISC_FEATURE (4)..(4): Xaa is any naturally occuring amino acid or is mutated
  MISC_FEATURE (8)..(8): Xaa = I or V
  MISC_FEATURE (10)..(10): Xaa = K or R
  MISC_FEATURE (11)..(11): Xaa is any naturally occuring amino acid or is mutated
  MISC_FEATURE (12)..(12): Xaa is any naturally occuring amino acid or is mutated
  MISC_FEATURE (13)..(13): Xaa = any naturally occuring amino acid
XXXXILAXEXXXXDQ
